(19) United States
(12) Patent Application Publication
(10) Pub. No.: US 2015/0329868 A1
(43) Pub. Date: Nov. 19, 2015

(54) MODIFIED PHOTOSYNTHETIC MICROORGANISMS FOR CONTINUOUS PRODUCTION OF CARBON-CONTAINING COMPOUNDS

(71) Applicant: Matrix Genetics, LLC, Seattle, WA (US)

(72) Inventors: Jason W. Hickman, San Diego, CA (US); Cameron Miller, Kirkland, WA (US); Mark Budde, Arcadia, CA (US); James Roberts, Seattle, WA (US); Fred Cross, New York, NY (US); Kimberly Marie Kotovic, Seattle, WA (US); Paul Warrener, Gaithersburg, MD (US); Brett K. Kaiser, Seattle, WA (US); Michael Carleton, Kirkland, WA (US)

(21) Appl. No.: 14/376,387

(22) PCT Filed: Jan. 31, 2013
(86) PCT No.: PCT/US13/24142

§ 371 Date: Aug. 1, 2014

Related U.S. Application Data
(60) Provisional application No. 61/595,017, filed on Feb. 3, 2012.
(60) Provisional application No. 61/625,887, filed on Apr. 18, 2012.
(60) Provisional application No. 61/753,339, filed on Jan. 16, 2013.

(51) Int. Cl. C12N 15/74; C12P 7/46; C12P 7/04; C12P 19/02; C12P 13/00; C12N 9/10; C12N 9/12; C12N 9/90; C12P 9/00; C12P 7/50; C12P 7/48

(52) U.S. Cl. CPC C12N 15/74; C12P 7/50; C12P 7/46; C12P 7/04; C12P 19/02; C12P 7/48; C12N 9/1051; C12N 9/1241; C12N 9/90; C12P 9/00; C12P 13/001

(57) ABSTRACT

The present invention relates to a continuous production system for producing carbon-containing compounds, comprising a genetically modified photosynthetic microorganism, such as a Cyanobacterium, that contains one or more mutations or deletions in a glycogen biosynthesis or storage pathway. The system and methods provided herein facilitate the production of carbon-containing compounds under reduced growth conditions, including biofuels, lipids, and other specialty chemicals, such as fatty acids, alkanes, alkenes, wax esters, and triglycerides.

### CROSS-REFERENCE TO RELATED APPLICATION

[0001] This application claims the benefit under 35 U.S.C. §119(e) of U.S. Provisional Patent Application No. 61/595,017 filed Feb. 3, 2012, U.S. Provisional Patent Application No. 61/625,887 filed Apr. 18, 2012, and U.S. Provisional Patent Application No. 61/753,339 filed Jan. 16, 2013, where these Provisional Applications are incorporated herein by reference in its entirety.

### SEQUENCE LISTING

[0002] The Sequence Listing associated with this application is provided in text format in lieu of a paper copy, and is hereby incorporated by reference into the specification. The name of the text file containing the Sequence Listing is M077-0008PCT_ST25.txt. The text file is about 692 KB, was created on Jan. 16, 2013, and is being submitted electronically via EFS-Web.

### BACKGROUND

[0003] 1. Technical Field

[0004] The present invention relates generally to a continuous production platform that utilizes photosynthetic microorganisms, e.g., Cyanobacteria, modified to uncouple photosynthesis from growth, to produce carbon-containing compounds, such as lipids, biofuels and other specialty chemicals.

[0005] 2. Description of the Related Art

[0006] Fatty acids are carboxylic acids with an unbranched aliphatic tail or chain, the latter ranging from about four to about 28 carbon atoms in length. Triglycerides are neutral polar molecules consisting of glycerol esterified with three fatty acid molecules. Triglycerides and fatty acids can be utilized as carbon and energy storage molecules by most eukaryotic organisms, including plants and algae, and by certain prokaryotic organisms, including certain species of actinomycetes and members of the genus Acinetobacter.

[0007] Triglycerides and fatty acids may also be utilized as a feedstock in the production of biofuels and/or other various specialty chemicals. For example, triglycerides and free fatty acids may be subject to a transesterification reaction, in which an alcohol reacts with triglyceride oils or fatty acid molecules, such as those contained in vegetable oils, animal fats, recycled greases, to produce biodiesels such as fatty acid alkyl esters. When triglycerides are included in the starting material, such reactions also produce glycerin as a by-product, which can be purified for use in the pharmaceutical and cosmetic industries

[0008] Certain organisms can be utilized as a source of triglycerides or free fatty acids in the production of biofuels. For example, algae naturally produce triglycerides as energy storage molecules, and certain biofuel-related technologies are presently focused on the use of algae as a feedstock for biofuels. Algae are photosynthetic organisms, and the use of triglyceride-producing organisms such as algae provides the ability to produce biodiesel from sunlight, water, CO₂, macronutrients, and micronutrients. Algae, however, cannot be readily genetically manipulated, and produce much less oil (i.e., triglycerides, fatty acids) under culture conditions than in the wild.

[0009] Like algae, Cyanobacteria obtain energy from photosynthesis, utilizing chlorophyll A and water to reduce CO₂. Certain Cyanobacteria can produce metabolites, such as carbohydrates, proteins, and fatty acids, from just sunlight, water, CO₂, water, and inorganic salts. Unlike algae, Cyanobacteria can be genetically manipulated. For example, Synechococcus is a genetically manipulable, oligotrophic Cyanobacterium that thrives in low nutrient level conditions, and in the wild accumulates fatty acids in the form of lipid membranes to about 10% by dry weight. Cyanobacteria such as Synechococcus, however, produce no triglyceride energy storage molecules, since Cyanobacteria typically lack the essential enzymes involved in triglyceride synthesis. Instead, Synechococcus in the wild typically accumulates glycogen as its primary carbon storage form.

[0010] Clearly, therefore, there is a need in the art for modified photosynthetic microorganisms, including Cyanobacteria, capable of producing lipids such as triglycerides and fatty acids, e.g., to be used as feed stock in the production of biofuels.

### BRIEF SUMMARY

[0011] The present invention provides systems and methods for the production of carbon-containing compounds.

[0012] In one embodiment, the present invention includes a system for producing carbon-containing compounds, comprising: a modified photosynthetic organism that accumulates a reduced amount of glycogen as compared to the wild-type photosynthetic microorganism; and a culture system for culturing said modified photosynthetic organism under a stress condition, wherein said modified photosynthetic organism maintains photosynthetic activity and accumulates reduced biomass when grown under said stress condition as compared to when grown under non-stress conditions. In particular embodiments, said modified photosynthetic microorganism produces or accumulates intracellularly and/or secretes an increased amount of one or more carbon-containing compounds when grown under said stress condition as compared to when grown under non-stress conditions.

[0013] In particular embodiments of the systems and related methods of the present invention, said modified photosynthetic microorganism: has reduced expression of one or more genes of a glycogen biosynthesis or storage pathway as compared to the wild-type photosynthetic microorganism; and/or comprises one or more introduced polynucleotides encoding a protein that increases glycogen breakdown or secretion. In particular embodiments, said stress condition is a reduced level of an essential nutrient, which is optionally selected from nitrogen, sulfur, or phosphorous. In certain embodiments, said modified photosynthetic organism produces and/or secretes an increased amount of at least one carbon-containing compound under said stress condition as compared to the wild-type organism under said stress condition, or as compared to the same modified photosynthetic organism under a non-stress condition, for example, an essential nutrient replete condition.

[0014] In a related embodiment, the invention includes methods for producing a carbon-containing compound other than glycogen, comprising culturing in a culture media under a stress condition a modified photosynthetic organism that accumulates a reduced amount of glycogen as compared to the wild-type photosynthetic organism, wherein said modified photosynthetic organism maintains photosynthetic activity and accumulates reduced biomass when grown under said stress condition as compared to when grown under non-stress conditions. In particular embodiments, said modified photosynthetic organism produces and/or secretes an increased amount of one or more carbon-containing compounds when grown under said stress condition as compared to when grown under a non-stress condition, such as an essential nutrient replete condition. In certain embodiments, said modified photosynthetic microorganism: has reduced expression of one or more genes of a glycogen biosynthesis or storage pathway as compared to the wild-type photosynthetic microorganism; and/or comprises one or more introduced polynucleotides encoding a protein that increases glycogen breakdown or increases secretion of a glycogen precursor. In certain embodiments, the method further comprises harvesting said culture media after said modified photosynthetic organism has been cultured under said stress condition. In other related embodiments, the method comprises obtaining said carbon-containing compound from said harvested culture media. In another embodiment, the method further comprises harvesting said modified photosynthetic organism after it has been cultured under said stress condition. In a related embodiment, the method further comprises obtaining said carbon-containing compound from said harvested modified photosynthetic organism.

[0015] In particular embodiments of systems and methods of the present invention, said stress condition is a reduced level of an essential nutrient, which is optionally selected from nitrogen, sulfur, and phosphorous. In certain embodiments, said modified photosynthetic organism secretes an increased amount of a carbon-containing compound under said stress condition as compared to the wild-type microorganism under said stress condition, or as compared to a corresponding modified photosynthetic microorganism under a non-stress condition.

[0016] In particular embodiments wherein said modified photosynthetic organism has reduced expression of one or more genes of a glycogen biosynthesis or storage pathway as compared to the wild-type photosynthetic organism, said one or more genes are selected from the group consisting of: a glucose-1-phosphate adenyltransferase (glgC) gene, a phosphoglucomutase (pgm) gene, and a glycogen synthase (glgA) gene. In certain embodiment, said one or more genes comprise a complete or partial gene deletion. In particular embodiments, said photosynthetic organism is a Cyanobacterium.

[0017] Examples of carbon-containing compounds include lipids, such as fatty acids, optionally free fatty acids, triglycerides, wax esters, fatty alcohols, and alkanes/alkenes, in addition to other specialty chemicals described herein, such as certain biofuels, 2-oxoglutarate, pyruvate, malate, fumarate, succinate, 4-hydroxybutyrate, 1,4 butanediol, glutaconic acid, 3-methyl-2-oxobutyrate, 3-methyl-2-oxovalerate, 4-methyl-2-oxopentanoate, isobutaraldehyde, isobutanol, 2-methyl-1-butanol, 3-methyl-2-butanol, isopentanol, glucose, glutathione, 3-phosphoglycerate, cis-aconitate, glycerin, and polyamine intermediates such as agmatine and putrescine. In certain embodiments, the carbon-containing compound is a precursor or intermediate of a specialty chemical, such as a feedstock for a biofuel, e.g., a lipid.

[0018] In certain embodiments, an introduced polynucleotide is exogenous to the photosynthetic microorganism's native genome, e.g., it may be a polynucleotide derived from a different species. In other embodiments, the introduced polynucleotide is a polynucleotide native to the photosynthetic microorganism's genome, i.e., corresponding to a gene or protein normally present in the photosynthetic microorganism, but it is overexpressed, for example, from a recombinantly introduced expression vector. In certain embodiments, the vector is an inducible vector. In particular embodiments, an introduced polynucleotide is present in the photosynthetic microorganism either transiently or stably. Thus, in various embodiments, the introduced polynucleotide is introduced into the photosynthetic microorganism or an ancestor thereof.

[0019] In further related embodiments, the present invention includes a modified photosynthetic microorganism having a reduced level of expression of one or more genes of a glycogen biosynthesis or storage pathway as compared to the level of expression of the one or more genes in a wild-type photosynthetic microorganism, and which also comprises one or more introduced polynucleotides encoding proteins of a glycogen breakdown pathway or a functional fragment or variant thereof.

[0020] In particular embodiments, modified photosynthetic microorganisms of the present invention, e.g., Cynanobacteria, synthesize or accumulate a reduced amount of glycogen under stress conditions as compared to a wild-type photosynthetic microorganism. In related embodiments, these photosynthetic microorganisms secrete or intracellularly accumulate an increased amount of one or more carbon-containing compounds as compared to a wild-type photosynthetic microorganism grown under a comparable stress condition. In certain embodiments, the stress conditions are reduced nitrogen conditions. In various other embodiments, modified photosynthetic microorganisms of the present invention synthesize or accumulate a reduced amount of glycogen and/or an increased amount of a (non-glycogen) carbon-containing compound as compared to a corresponding wild-type photosynthetic microorganism grown under said stress conditions, or as compared to the same or comparable modified photosynthetic microorganism grown under non-stress conditions.

[0021] In certain embodiments, the one or more genes having reduced expression in a modified photosynthetic microorganism of the present invention are selected from glucose-1-phosphate adenyltransferase (glgC), phosphoglucomutase (pgm), and/or glycogen synthase (glgA). In particular embodiments, the modified photosynthetic microorganism comprises a mutation of one or more genes of a glycogen biosynthesis or storage pathway. In one specific embodiment, the photosynthetic microorganism comprises mutations of the glgC gene or the pgm gene. In one specific embodiment, the photosynthetic microorganism comprises mutations of the glgC gene and the pgm gene. In various embodiments, the mutations are complete or partial gene deletions.

[0022] In particular embodiments, the modified photosynthetic microorganism is a Synechococcus elongatus. In one embodiment, the Synechococcus elongatus is strain PCC 7942. In certain embodiments, the modified photosynthetic microorganism is a salt tolerant variant of S. elongatus PCC 7942. In other embodiments, the modified photosynthetic microorganism is Synechococcus sp. PCC 7002 or Synechocystis sp. PCC 6803.

[0023] In another related embodiment, the present invention provides a method of producing a carbon-containing compound other than glycogen, comprising producing said carbon-containing compound in a modified photosynthetic microorganism, e.g., a Cyanobacterium, having a reduced level of expression of one or more genes of a glycogen biosynthesis or storage pathway and/or comprising one or more polynucleotides encoding a protein of a glycogen breakdown or glycogen precursor secretion pathway or a functional fragment or variant thereof, wherein said modified photosynthetic microorganism is grown or cultured under a stress condition, e.g., reduced nitrogen conditions. In certain embodiments, the photosynthetic microorganism maintains photosynthesis but has reduced growth, relative to the same microorganism grown under non-stress conditions. In certain embodiments, the photosynthetic microorganism accumulates or secretes an increased amount of said carbon-containing compound as compared to a wild-type photosynthetic microorganism grown under said stress condition. In particular embodiments, the one or more genes are glucose-1-phosphate adenyltransferase (glgC), phosphoglucomutase (pgm), and/or glycogen synthase (glgA). In one particular embodiment, the photosynthetic microorganism comprises mutations in the one or more genes having reduced expression. In particular embodiments, the genes include the glgC gene and/or the pgm gene. In some embodiments, the mutations are complete or partial gene deletions.

[0024] In particular embodiments of the methods of the present invention, the photosynthetic microorganism is a Cyanobacterium. In certain embodiments, the Cyanobacterium is a Synechococcus elongatus. In one embodiment, the Synechococcus elongatus is strain PCC 7942. In certain embodiments, the modified photosynthetic microorganism is a salt tolerant variant of S. elongatus PCC 7942. In other embodiments, the modified photosynthetic microorganism is Synechococcus sp. PCC 7002 or Synechocystis sp. PCC 6803.

[0025] In certain embodiments, any of the modified photosynthetic microorganisms described above further comprise one or more additional modifications. As one example, such modified microorganisms may further comprise one or more introduced or overexpressed polynucleotides encoding one or more proteins associated with lipid biosynthesis. In certain aspects, the one or more proteins associated with lipid biosynthesis include an acyl-ACP reductase, acyl carrier protein (ACP), acyl ACP synthase (Aas), alcohol dehydrogenase, aldehyde dehydrogenase, aldehyde decarbonylase, thioesterase (TES), acetyl coenzyme A carboxylase (ACCase), diacylglycerol acyltransferase (DGAT), phosphatidic acid phosphatase (PAP; or phosphatidate phosphatase), triacylglycerol (TAG) hydrolase, fatty acyl-CoA synthetase, lipase/phospholipase, or any combination thereof.

[0026] In certain embodiments, the one or more enzymes associated with lipid biosynthesis comprises a diacylglycerol acyltransferase (DGAT), and the carbon-containing compounds produced by the modified photosynthetic microorganism comprise a triglyceride. In these and related embodiments, for instance, to increase production of triglycerides, the modified photosynthetic microorganism may further comprise one or more introduced or overexpressed polynucleotides encoding an acyl-ACP reductase, aldehyde dehydrogenase, phosphatidate phosphatase (PAP), acetyl coenzyme A carboxylase (ACCase), acyl carrier protein (ACP), phospholipase B, phospholipase C, fatty acyl Co-A synthetase, or any combination thereof. In specific embodiments, the modified photosynthetic microorganism comprises a DGAT in combination with an ACCase. In particular embodiments, the modified photosynthetic microorganism comprises a DGAT in combination with a PAP. In further embodiments, the modified photosynthetic microorganism comprises a DGAT in combination with an ACCase and a PAP.

[0027] In particular embodiments, the one or more enzymes associated with lipid biosynthesis comprises an acyl-ACP reductase. In some aspects, the expression or overexpression of an acyl-ACP reductase increases production of fatty acids, such as free fatty acids. In certain instances, such modified photosynthetic microorganisms may further comprise one or more introduced or overexpressed polynucleotides encoding an aldehyde dehydrogenase, to further increase production of fatty acids. In these and related embodiments, the modified photosynthetic microorganism may further comprise reduced expression of an aldehyde decarbonylase, reduced expression of an endogenous alcohol dehydrogenase, or both, to respectively shunt carbon away from alkanes and fatty alcohols and towards fatty acids.

[0028] In some embodiments, the one or more enzymes associated with lipid biosynthesis comprises an acyl-ACP reductase in combination with a diacylglyceroltransferase (DGAT), and the carbon-containing compounds produced by the modified photosynthetic microorganism comprise a triglyceride. In these and related embodiments, the modified photosynthetic microorganism may further comprise reduced expression of an endogenous aldehyde decarbonylase, to shunt carbon away from alkanes and towards fatty acids and thus triglycerides. In some embodiments, the DGAT may have wax ester synthase activity and the modified photosynthetic microorganism may further comprise an introduced or overexpressed alcohol dehydrogenase, where the carbon-containing compounds produced by the microorganism comprise a wax ester. In these and related embodiments, the modified photosynthetic microorganism may further comprise reduced expression of an endogenous aldehyde dehydrogenase, reduced expression of an aldehyde decarbonylase, or both, to respectively shunt carbon away from fatty acids and alkanes and towards wax esters.

[0029] In some embodiments, the one or more enzymes associated with lipid biosynthesis comprises an acyl-ACP reductase in combination with an alcohol dehydrogenase, wherein the carbon-containing compounds produced by the microorganism comprise a fatty alcohol. In these and related embodiments, the modified photosynthetic microorganism may further comprise reduced expression of an endogenous aldehyde decarbonylase, an endogenous aldehyde dehydrogenase, or both, to respectively shunt carbon away from alkanes and fatty acids and towards fatty alcohols.

[0030] In some embodiments, the one or more enzymes associated with lipid biosynthesis comprises an acyl-ACP reductase in combination with an aldehyde decarbonylase, wherein the carbon-containing compounds produced by the microorganism comprise an alkane. In these and related embodiments, the modified photosynthetic microorganism may further comprise reduced expression of an endogenous aldehyde dehydrogenase, reduced expression of an endogenous alcohol dehydrogenase, or both, to respectively shunt carbon away from fatty acids and fatty alcohols and towards alkanes.

[0031] In certain embodiments, the modified photosynthetic microorganisms described herein further comprise one or more of the following: (i) one or more overexpressed (e.g., introduced) polynucleotides encoding (a) an acyl carrier protein (ACP), (b) an acetyl coenzyme A carboxylase (ACCase), (c) a diacylglycerol acyltransferase (DGAT) optionally in combination with a fatty acyl Co-A synthetase, (d) an aldehyde dehydrogenase, (e) an alcohol dehydrogenase that is capable of converting a fatty aldehyde into a fatty alcohol optionally in combination with a wax ester synthase (e.g., DGAT having wax ester synthase activity), (f) a thioesterase, (g) an acyl-ACP reductase; or (h) any combination of (a)-(g); (ii) reduced expression of one or more genes encoding an endogenous aldehyde decarbonylase; (iii) reduced expression of one or more genes encoding an acyl-ACP synthetase (Aas), or (iv) any combination of (i)-(iii).

[0032] Certain embodiments relate to methods for providing secretion of glucose from a photosynthetic microorganism, comprising culturing a modified photosynthetic organism in a media under a stress condition, wherein said photosynthetic microorganism: (a) accumulates a reduced amount of glycogen as compared to the wild-type photosynthetic microorganism, and (b) comprises one or more introduced or (over)expressed polynucleotides encoding a glucose permease, wherein said modified photosynthetic organism maintains photosynthetic activity and accumulates reduced biomass when grown under said stress condition as compared to when grown under non-stress conditions.

[0033] Some embodiments relate to methods for producing isobutanol or isopentanol, comprising culturing a modified photosynthetic organism in a media under a stress condition, wherein said photosynthetic microorganism: (a) accumulates a reduced amount of glycogen as compared to the wild-type photosynthetic microorganism, and (b) comprises one or more introduced or overexpressed polynucleotides encoding one or more polypeptides associated with production of isobutanol or isopentanol, wherein said modified photosynthetic microorganism maintains photosynthetic activity and accumulates reduced biomass when grown under said stress condition as compared to when grown under non-stress conditions. In particular embodiments, said one or more polypeptides of (b) are selected from a gene that converts a 2-keto acid to an aldehyde (2-keto acid decarboxylase) and a gene that converts the aldehyde to an alcohol (alcohol dehydrogenase).

[0034] Certain embodiments relate to methods for producing 4-hydroxybutyrate, comprising culturing a modified photosynthetic organism in a media under a stress condition, wherein said photosynthetic microorganism: (a) accumulates a reduced amount of glycogen as compared to the wild-type photosynthetic microorganism, and (b) comprises one or more introduced or overexpressed polynucleotides encoding one or more polypeptides associated with production of 4-hydroxybutyrate, wherein said modified photosynthetic microorganism maintains photosynthetic activity and accumulates reduced biomass when grown under said stress condition as compared to when grown under non-stress conditions. In specific embodiments, said one or more polypeptides of (b) are an alpha ketoglutarate decarboxylase, a 4-hydroxybutyrate dehydrogenase, a succinyl-CoA synthetase, a succinate-semialdehyde dehydrogenase, or any combination thereof. Also included are methods for producing 1,4-butanediol, wherein said photosynthetic microorganism: (c) further comprises one or more introduced or overexpressed polynucleotides encoding one or more polypeptides associated with production of 1,4-butanediol from 4-hydroxybutyrate. In some embodiments, said one or more polypeptides of (c) are a 4-hydroxybutyryl-CoA transferase, an aldehyde/alcohol dehydrogenase that is optionally capable of reducing coA-linked substrates to aldehydes/alcohols, or both.

[0035] Particular embodiments relate to methods method of producing a polyamine intermediate, comprising culturing a modified photosynthetic organism in a media under a stress condition, wherein said photosynthetic microorganism: (a) accumulates a reduced amount of glycogen as compared to the wild-type photosynthetic microorganism, and (b) optionally comprises one or more introduced or overexpressed polynucleotides encoding one or more polypeptides associated with production of a polyamine intermediate, wherein said modified photosynthetic organism maintains photosynthetic activity and accumulates reduced biomass when grown under said stress condition as compared to when grown under non-stress conditions. In some embodiments, said polyamine intermediate is putrescine or agmatine. In some embodiments, said one or more polypeptides is an arginine decarboxylase, and said polyamine intermediate is agmatine. In specific embodiments, said one or more polypeptides is an arginine decarboxylase, an agmatine deiminase, an N-carbamoylputrescine amidase, or any combination thereof, and said polyamine intermediate is putrescine.

[0036] In certain embodiments, an overexpressed polypeptide is encoded by (i) an endogenous polynucleotide which is operably linked to one or more introduced regulatory elements, or (ii) an introduced polynucleotide. In particular embodiments, the one or more introduced regulatory elements or introduced polynucleotides are exogenous to the photosynthetic microorganism's native genome. In certain embodiments, one or more introduced regulatory elements or introduced polynucleotides are derived from the same genus as said modified photosynthetic microorganism. In specific embodiments, said one or more introduced regulatory elements or introduced polynucleotides are derived from the same species as said modified photosynthetic microorganism. In some embodiments, said one or more introduced regulatory elements or introduced polynucleotides are derived from a different genus or species relative to said modified photosynthetic microorganism. In particular embodiments, said one or more introduced regulatory elements are selected from at least one of a promoter, enhancer, repressor, ribosome binding site, and a transcription termination site.

[0037] In certain embodiments, said one or more introduced regulatory elements comprises an inducible promoter. In some embodiments, said inducible promoter is a weak promoter under non-induced conditions. In certain embodiments, said one or more introduced regulatory elements comprises a constitutive promoter.

[0038] In certain embodiments, one or more of said introduced polynucleotides is present in one or more expression constructs. In certain embodiments, said expression construct is stably integrated into the genome of said modified photosynthetic microorganism. In certain embodiments, said expression construct comprises an inducible promoter. In some embodiments, one or more of said introduced polynucleotides are present in an expression construct comprising a weak promoter under non-induced conditions.

[0039] In certain embodiments, one or more of said introduced polynucleotides are codon-optimized for expression in a Cyanobacterium. In particular embodiments, one or more of said codon-optimized polynucleotides are codon-optimized for expression in a Synechococcus elongatus. In certain embodiments, said photosynthetic microorganism is a Cyanobacterium and said Cyanobacterium is a Synechococcus elongatus. In specific embodiments, said Synechococcus elongatus is strain PCC7942. In certain embodiments, said Cyanobacterium is a salt tolerant variant of Synechococcus elongatus strain PCC7942. In other embodiments, said photosynthetic microorganism is a Cyanobacterium and said Cyanobacterium is Synechococcus sp. PCC7002. In certain embodiments, said photosynthetic microorganism is a Cyanobacterium and said Cyanobacterium is Synechocystis sp. PCC6803.

[0040] As noted above, also included are methods for the production of carbon-containing compounds such as lipids, comprising culturing a modified photosynthetic microorganism described herein under stress conditions, wherein said modified photosynthetic microorganism accumulates an increased amount of carbon-containing compound as compared to a corresponding wild-type photosynthetic microorganism grown under said stress condition, and wherein said modified photosynthetic microorganism maintains photosynthesis but has reduced growth. In certain embodiments, said culturing comprises inducing expression of one or more of said introduced polynucleotides. In some embodiments, said culturing comprises culturing under static growth conditions. In certain embodiments, said inducing occurs under static growth conditions.

[0041] Certain of the methods and systems described herein include the step of relieving the stress condition, for instance, when the ratio of absorbance (680/750 nm) of the culture is (or falls to) about 10%-90% of the ratio of a corresponding culture under non-stress conditions, where relieving the stress condition increases photosynthetic activity of the modified photosynthetic microorganism and/or increases the ratio of absorbance of the culture. In some aspects, the stress condition comprises reduced or depleted levels of an essential nutrient (e.g., nitrogen, phosphorous, sulfur), and the methods include adding (i.e., pulsing the culture with) the essential nutrient in an amount sufficient to increase photosynthetic activity and/or increase the ratio of absorbance. In certain embodiments, said photosynthetic activity increases by at least about 10% relative to photosynthetic activity immediately prior to relief of said stress condition. In particular embodiments, the modified photosynthetic microorganism maintains the increased photosynthetic activity for a substantially longer time (e.g., about 1.5, 2, 3, 4, 5, 6, 7, 8, 9, 10 or more times longer) than a wild-type photosynthetic microorganism under the same or comparable culture conditions. In certain aspects, the ratio of absorbance increases to greater than about 90% of the ratio of a corresponding culture under non-stress conditions, where non-stress conditions optionally comprise nutrient replete conditions. In most instances, the modified photosynthetic microorganism culture maintains the increased ratio of absorbance for a substantially longer time (e.g., about 1.5, 2, 3, 4, 5, 6, 7, 8, 9, 10 or more times longer) than a wild-type photosynthetic microorganism culture under the same or comparable culture conditions. After relief of the stress condition and an initial increase in photosynthetic activity, there is often a subsequent decrease in photosynthetic activity, and in certain aspects the decrease in photosynthetic activity by the modified photosynthetic microorganism is substantially less (e.g., about 1.5, 2, 3, 4, 5, 6, 7, 8, 9, 10 or more times less) than the subsequent decrease in photosynthetic activity by a wild-type photosynthetic microorganism culture under the same or comparable culture conditions. Certain embodiments further comprise repeating the step of relieving the stress condition when the ratio of absorbance falls (again) to about 10%-90% of the ratio of a corresponding culture under non-stress conditions.

[0042] Certain of the methods and systems described herein include the step of relieving the stress condition, for instance, at about 2, 3, 4, 5, 6, 7, 8, 9, 10, 11, 12, 13, or 14 days following initiation of the stress condition, where relieving the stress condition increases photosynthetic activity. In certain aspects, the stress condition comprises reduced level of an essential nutrient, and relieving the stress condition comprises adding (i.e., pulsing the culture with) the essential nutrient in an amount sufficient to increase photosynthetic activity. In some embodiments, said photosynthetic activity increases by at least about 10% relative to photosynthetic activity immediately prior to relief of said stress condition. In particular embodiments, the modified photosynthetic microorganism maintains the increased photosynthetic activity for a substantially longer time than a wild-type photosynthetic microorganism under the same or comparable culture conditions. Similar to above, there is often a subsequent decrease in photosynthetic activity following relief of the stress condition and an initial increase in photosynthetic activity, and in certain aspects the decrease in photosynthetic activity by the modified photosynthetic microorganism is substantially less (e.g., about 1.5, 2, 3, 4, 5, 6, 7, 8, 9, 10 or more times less) than the subsequent decrease in photosynthetic activity by a wild-type photosynthetic microorganism culture under the same or comparable culture conditions. Certain embodiments further comprise repeating the step of relieving the stress condition about every 2, 3, 4, 5, 6, 7, 8, 9, 10, 11, 12, 13, or 14 days following previous relief of the stress condition, where relieving the stress condition increases photosynthetic activity.

[0043] In certain embodiments, the essential nutrient is selected from at least one of nitrogen, sulfur, and phosphorous. In specific embodiments, the essential nutrient is nitrogen, which can added, for example, in the form of NaNO₃, NH₄Cl, (NH₄)₂SO₄, NH₄HCO₃, CH₄N₂O, KNO₃, or any combination thereof, optionally to achieve a final concentration ranging from about 0.02 mM to about 20 mM to about 30 mM.

[0044] In certain embodiments, the photosynthetic activity of the modified photosynthetic microorganism under the stress condition is least about 20% of photosynthetic activity of the modified photosynthetic microorganism or the wild-type photosynthetic microorganism under non-stress conditions. In particular embodiments, the photosynthetic activity of the modified photosynthetic microorganism under the stress condition is least about 50% of photosynthetic activity of the modified photosynthetic microorganism or the wild-type photosynthetic microorganism under non-stress conditions. In certain embodiments, the photosynthetic activity of the modified photosynthetic microorganism under the stress condition is substantially greater (e.g., at least about 1.5, 2, 3, 4, 5, 6, 7, 8, 9, 10 or 20-fold greater) than photosynthetic activity of the wild-type photosynthetic microorganism under the stress condition. In certain aspects, said photosynthetic activity is measured at about day 2, 3, 4, 5, 6, 7, 8, 9, 10, 11, 12, 13, or 14 post-initiation of the stress condition.

[0045] In some of the methods and systems described herein, the maintenance of photosynthetic activity comprises maintenance of chlorophyll A levels. In particular embodiments, chlorophyll A levels of the modified photosynthetic microorganism under the stress condition are at least about 20% of chlorophyll A levels of the modified photosynthetic microorganism or the wild-type photosynthetic microorganism under non-stress conditions. In some embodiments, chlorophyll A levels of the modified photosynthetic microorganism under the stress condition are at least about 50% of chlorophyll A levels of the modified photosynthetic microorganism or the wild-type photosynthetic microorganism under non-stress conditions. In certain embodiments, chlorophyll A levels of the modified photosynthetic microorganism under the stress condition are substantially greater (e.g., at least about 1.5, 2, 3, 4, 5, 6, 7, 8, 9, 10 or 20-fold greater) than chlorophyll A levels of the wild-type photosynthetic microorganism under the stress condition. In certain aspects, chlorophyll A levels are measured at about day 2, 3, 4, 5, 6, 7, 8, 9, 10, 11, 12, 13, or 14 post-initiation of the stress condition.

### BRIEF DESCRIPTION OF THE SEVERAL VIEWS OF THE DRAWINGS

[0046] FIG. 1 shows measurements of S. elongatus photosynthetic complexes during nitrogen starvation, comparing wild-type to glycogen synthesis mutants.

[0047] FIGS. 2a and 2b show attenuation of the NtcA-mediated transcriptional response in nitrogen starved glgC mutants.

[0048] FIG. 3 shows nitrogen deprivation of glgC mutant for 24 hours triggers excretion of 2-oxoglutarate equivalent to 10-15% of culture dry weight. Cultures of wild type (WT) and ΔglgC were resuspended in either nitrogen replete (1×N) or media depleted entirely of nitrate (0×N) and maintained in constant light at 30° C. for 24 hours. 2-oxoglutarate level (μM) in the culture media was monitored for each sample by enzymatic assay at the specified times. Data was generated in triplicate and error is expressed as standard deviation of the mean. Samples whose mean fell below the 1 μM detection limit of the assay are not graphed.

[0049] FIG. 4 shows elimination of glycogen synthesis alters expression of nblA in response to nitrogen stress.

[0050] FIGS. 5a-5c show that KgtP-facilitated internalization of 2-oxoglutarate delays nblA-luxAB reporter activation and phycobilisome degradation in response to nitrogen stress.

[0051] FIG. 6 shows chlorophyll A levels for wild-type S. elongatus and glgC mutant following nitrogen starvation, indicated as a percentage of wild-type chlA levels under non-stress (nitrogen replete) conditions.

[0052] FIGS. 7a and 7b show a non-chlorotic phenotype of ΔglgC in response to nitrogen stress.

[0053] FIG. 8 shows that ΔglgA exhibits a non-chlorotic phenotype in response to nitrogen stress.

[0054] FIG. 9 shows that nitrogen stress triggers immediate growth arrest in the ΔglgC mutant.

[0055] FIG. 10 shows that deletion of glgC eliminates glycogen synthesis in S. elongatus.

[0056] FIG. 11 shows that deletion of glgC does not alter the reduction in O₂ evolution activity observed in S. elongatus in response to nitrogen stress.

[0057] FIGS. 12a and 12b show transformation of ΔglgC with glgC transgene (glgC^{TG}) restores chlorosis and glycogen synthesis under nitrogen stress.

[0058] FIGS. 13a-13d show a non-chlorotic phenotype of ΔglgC in response to sulfur and phosphate stress.

[0059] FIG. 14 shows the amount of 2-oxoglutarate secreted each day by the glgC and glgA mutants post nitrogen starvation.

[0060] FIGS. 15a-15e show secretion of carbon skeletons into the culture media by nitrogen starved glgC mutants.

[0061] FIGS. 16a-16c show that accumulation of metabolites in a nitrogen starved glgC mutant can be converted to metabolic precursors of volatile biofuel end products.

[0062] FIGS. 17a-17i show increased production of carbon-containing compounds by a nitrogen starved glgC mutant, including amino acid precursor metabolites, TCA cycle metabolites, and glycolysis metabolites.

[0063] FIGS. 18a-18b show increased production of carbon-containing compounds by a nitrogen starved glgC mutant, including polyamine metabolites agmatine and putrescine. Cultures of wild type and ΔglgC were resuspended in either nitrogen replete (1×N) or media depleted entirely of nitrate (0×N).

[0064] FIGS. 19a-19c show elimination of glycogen synthesis triggers excretion of TCA cycle intermediates in response to nitrogen stress.

[0065] FIG. 20 shows elimination of glycogen synthesis alters intracellular partitioning of glycolytic and TCA cycle intermediates in response to nitrogen starvation.

[0066] FIG. 21 illustrates certain of the metabolites that are increased (bold) or decreased (bold italics) in nitrogen starved mutants that accumulate a reduced amount of glycogen, and some the carbon-containing compounds that can be produced therefrom.

[0067] FIG. 22 shows biosynthetic pathways for the production of 4-hydroxybutyrate and 1,4-butanediol.

[0068] FIG. 23 shows a biosynthetic pathway for the production of putrescine, a polyamine.

### DETAILED DESCRIPTION

[0069] The present invention is based, in part, upon the discovery that certain modified photosynthetic microorganisms, e.g., Cyanobacteria, modified to have reduced glycogen accumulation (e.g., due to decreased production or increased degradation or secretion), are capable of producing carbon-containing compounds and maintaining photosynthesis under stress conditions that otherwise inhibit or reduce their growth. Accordingly, under such stress conditions, glycogen reduced or deficient photosynthetic microorganisms may be used for continuous photosynthetic production of carbon-containing compounds without biomass growth.

[0070] Cyanobacteria are photosynthetic bacteria that obtain energy and reducing power from sunlight and water to reduce CO₂ to carbohydrates. Synechococcus elongatus PCC 7942 is a genetically malleable cyanobacterium that is reasonably well studied with regard to its physiology and molecular biology. However, during algal production of carbon-containing compounds, large amounts of carbon and energy are used for accumulation of cellular biomass, and this is a significant drain on cellular resources that could otherwise be used for production of any given carbon-containing compound. Limiting or eliminating general biomass accumulation while maintaining photosynthetic activity and production of desired end products has the potential to increase the efficiency and yield of cyanobacteria-based production platforms.

[0071] Another challenge to algal productions systems is that desirable end products are accumulated inside cells. This requires periodic harvesting of whole biomass from the production system to extract the product of interest followed by regrowth of another batch of biomass. The carbon, energy, and nutrients required to generate this biomass are lost if the biomass is not recycled into the next round of growth. These recycling processes are not well developed and require a significant energy input which negatively impacts the net energy that can be obtained from algal biofuel production systems and greatly increases the cost of production.

[0072] The accompanying description and Examples describe S. elongatus strains and growth conditions that allow for a continuous production platform that consists of both internal and secreted end products combined with minimal biomass accumulation during the production phase. This end was achieved by the combination of growth conditions that limit nutrients necessary for biomass accumulation, such as nitrogen depletion, along with gene mutations that prohibit glycogen storage and thereby alter the physiological response and global carbon flow under nutrient limitation. For example, without wishing to be bound to any particular theory, it is understood that in wild-type cells, upon nitrogen limitation, levels of the TCA cycle metabolite 2-oxoglutarate increase inside the cell, due to an inability to convert this metabolite into the amino acids glutamate and glutamine. As 2-oxoglutarate levels increase it activates a genetic program through multiple regulatory proteins, such as NtcA and PII (glnK). NtcA and PII bind to 2-oxoglutarate and regulate transcription of multiple genes, resulting in the degradation of photosynthetic complexes and the storage of carbon as glycogen. For wild-type cells, this process results in a decreased ability to photosynthesize and convert carbon dioxide to carbon-containing compounds such as biofuel end products, or other specialty chemicals or intermediates thereof.

[0073] The invention described herein allows maintenance of photosynthetic activity of photosynthetic microorganisms such as Synechococcus elongatus PCC 7942 during nutrient starvation by generation of a strain that suppresses the normal physiological response to nutrient limitation, does not store carbon as glycogen, and results in the intracellular accumulation of carbon-containing compounds and/or secretion of carbon-containing compounds from the cells into the media. The fact that photosynthesis and cell growth could be uncoupled under stress conditions by reducing glycogen biosynthesis is both surprising and unexpected. In addition, this surprising discovery affords major advantages, since it allows for the continuous photosynthetic production of carbon-containing compounds, while reducing cell growth and associated shading effects that result at high cell density. In addition, this discovery reduces the frequency with which a culture must be divided or its density reduced.

[0074] Among other combinations described herein, embodiments of the present invention may be combined with the discovery that expression or overexpression of certain genes involved in lipid biosynthesis leads to higher levels of lipid biosynthesis. Thus, in certain embodiments, modified photosynthetic microorganisms, e.g., Cyanobacteria, used according to the present invention further comprise one or more exogenous (i.e., introduced) or overexpressed polynucleotides that encode a lipid biosynthesis protein. Specific examples of lipid biosynthesis proteins include acyl-ACP reductases, acyl carrier proteins (ACP), acyl-ACP synthases (Aas), thioesterases or acyl-ACP thioesterases (TES) such as TesA or FatB, diacylglycerol acyltransferases (DGAT), acetyl coenzyme A carboxylases (ACCase), phosphatidic acid phosphatases (PAP; or phosphatidate phosphatases), triacylglycerol (TAG) hydrolases or lipases, fatty acyl-CoA synthetases, aldehyde dehydrogenases, alcohol dehydrogenases, aldehyde decarbonylases, lipases, and phospholipases (PL) such as phospholipase A, B, or C. In certain instances, as described herein, reduced expression and/or activity of selected lipid biosynthesis genes can increase production of one or more desired lipids, for instance, by shunting carbon towards the desired lipid(s). Hence, various combinations of overexpressed and/or reduced lipid biosynthesis proteins can be employed to optimize production of selected lipids relative to others, such as fatty acids, triglycerides, wax esters, fatty alcohols, and alkanes/alkenes. Lipid biosynthesis proteins are described in greater detail below.

[0075] Aspects of the present invention can also be combined with the discovery that photosynthetic microorganisms such as Cyanobacteria can be genetically modified in other ways to increase the production of fatty acids, as described herein and in International Patent Applications US2009/061936 and PCT/US2011/065896 and U.S. patent application Ser. No. 12/605,204.

[0076] For instance, as described in PCT/US2011/065896, (over)expression of an acyl-ACP reductase (e.g., orf1594) has been shown to increase production of fatty aldehydes, which can then be converted to fatty acids by an aldehyde dehydrogenase. Hence, in certain aspects, an introduced or overexpressed acyl-ACP reductase, optionally in combination with an introduced or overexpressed aldehyde dehydrogenase, can be employed to further increase the production of fatty acids under stress conditions. The introduction or overexpression of an acyl-ACP reductase can be combined with expression and/or reduction (e.g., deletion) of various combinations of lipid biosynthesis proteins, described herein, to selectively increase production of certain lipids relative to others, such as fatty acids, triglycerides, wax esters, fatty alcohols, and alkanes/alkenes. Merely by way of illustration, an introduced or overexpressed acyl-ACP reductase can be combined with an introduced or overexpressed aldehyde dehydrogenase to increase fatty acids and optionally triglycerides (e.g., when further combined with an introduced or overexpressed DGAT), an introduced or overexpressed aldehyde decarbonylase to increase alkanes/alkenes, or an introduced or overexpressed alcohol dehydrogenase to increase production of fatty alcohols and optionally triglycerides/wax esters (e.g., when further combined with an introduced or overexpressed DGAT), among other combinations described herein.

[0077] In a variety of aspects, embodiments of the present invention are also useful in combination with the related discovery that photosynthetic microorganisms, including Cyanobacteria, such as Synechococcus, which do not naturally produce triglycerides, can be genetically modified to synthesize triglycerides, as described herein and in International Patent Application US2009/061936 and U.S. patent application Ser. No. 12/605,204, filed Oct. 23, 2009, titled Modified Photosynthetic Microorganisms for Producing Triglycerides. For instance, the addition of one or more polynucleotide sequences that encode one or more enzymes associated with triglyceride synthesis renders Cyanobacteria capable of converting their naturally-occurring fatty acids into triglyceride energy storage molecules. Examples of enzymes associated with triglyceride synthesis include enzymes having a phosphatidate phosphatase activity (PAP) and enzymes having a diacylglycerol acyltransferase activity (DGAT). Specifically, phosphatidate phosphatase enzymes catalyze the production of diacylglycerol molecules, an immediate pre-cursor to triglycerides, and DGAT enzymes catalyze the final step of triglyceride synthesis by converting the diacylglycerol precursors to triglycerides. Hence, recombinant introduction or overexpression of DGAT, PAP, or both, can be utilized to produce triglycerides under stress conditions. Further, because fatty acids provide the starting material for triglycerides, increasing the production of fatty acids in genetically modified photosynthetic microorganisms may be utilized to increase the production of triglycerides, for instance, by increasing ACCase and/or acyl-ACP reductase activity, as described herein and in International Patent Applications PCT/US2009/061936 and PCT/US2011/065896.

[0078] In particular aspects, embodiments of the present invention may also be combined with the discovery that the co-expression of an acyl-ACP reductase, alcohol dehydrogenase and a DGAT or other polypeptide having wax ester synthase activity results in wax ester formation, via the acyl-ACP=>fatty aldehyde pathway. For instance, Cyanobacteria over-expressing an acyl-ACP reductase (e.g., orf1594), a long chain alcohol dehydrogenase, and the bi-functional aDGAT enzyme not only produce fewer triglycerides, but also produce wax esters. Because these modified Cyanobacteria produce free fatty acids, and thus suggest that endogenous aldehyde dehydrogenase encoded by orf0489 competes with alcohol dehydrogenase for acyl aldehyde substrate, reduced expression (e.g., deletion) of orf0489 may increase wax ester synthesis in these and related microorganisms, relative to modified microorganisms having no reduced expression of orf0489. Further, because aldehyde decarbonylase encoded by orf1593 may also compete with alcohol dehydrogenase for acyl aldehyde substrate, reduced expression (e.g., deletion) of orf1593 may independently increase wax ester synthesis, and when combined with reduced expression of orf0489 may even further increase wax ester synthesis. Increased wax ester formation may also be achieved by combining any one of these or related embodiments with overexpression of other genes related to fatty aldehyde synthesis, including acyl carrier protein (ACP), Aas, or both.

[0079] Other combinations are described herein and will be apparent to persons skilled in the art, including those that relate to the production of non-lipid carbon-containing compounds. Examples of such compounds include but are not limited to various amino acid precursor metabolites, TCA cycle metabolites such as 2-Oxoglutarate, succinatem, and fumarate, glycolysis metabolites such as glucose, isobutanol, isopentanol, 4-hydroxybutyrate, 1,4-butanediol, and polyamine intermediates such as agmatine and putrescine.

### DEFINITIONS

[0080] Unless defined otherwise, all technical and scientific terms used herein have the same meaning as commonly understood by those of ordinary skill in the art to which the invention belongs. Although any methods and materials similar or equivalent to those described herein can be used in the practice or testing of the present invention, preferred methods and materials are described. For the purposes of the present invention, the following terms are defined below.

[0081] The articles “a” and “an” are used herein to refer to one or to more than one (i.e. to at least one) of the grammatical object of the article. By way of example, “an element” means one element or more than one element.

[0082] By “about” is meant a quantity, level, value, number, frequency, percentage, dimension, size, amount, weight or length that varies by as much as 30, 25, 20, 15, 10, 9, 8, 7, 6, 5, 4, 3, 2 or 1% to a reference quantity, level, value, number, frequency, percentage, dimension, size, amount, weight or length.

[0083] The term “biologically active fragment”, as applied to fragments of a reference polynucleotide or polypeptide sequence, refers to a fragment that has at least about 0.1, 0.5, 1, 2, 5, 10, 12, 14, 16, 18, 20, 22, 24, 26, 28, 30, 35, 40, 45, 50, 55, 60, 65, 70, 75, 80, 85, 90, 95, 96, 97, 98, 99, 100, 110, 120, 150, 200, 300, 400, 500, 600, 700, 800, 900, 1000% or more of the activity of a reference sequence. The term “reference sequence” refers generally to a nucleic acid coding sequence, or amino acid sequence, to which another sequence is being compared. All sequences provided in the Sequence Listing are also included as reference sequences.

[0084] The term “biologically active variant”, as applied to variants of a reference polynucleotide or polypeptide sequence, refers to a variant that has at least about 0.1, 0.5, 1, 2, 5, 10, 12, 14, 16, 18, 20, 22, 24, 26, 28, 30, 35, 40, 45, 50, 55, 60, 65, 70, 75, 80, 85, 90, 95, 96, 97, 98, 99, 100, 110, 120, 150, 200, 300, 400, 500, 600, 700, 800, 900, 1000% or more of the activity (e.g., an enzymatic activity) of a reference sequence. The term “reference sequence” refers generally to a nucleic acid coding sequence, or amino acid sequence, to which another sequence is being compared. The term “variant” encompasses biologically active variants, which may also be referred to as functional variants.

[0085] Included within the scope of the present invention are biologically active fragments of at least about 18, 19, 20, 21, 22, 23, 24, 25, 26, 27, 28, 29, 30, 40, 50, 60, 70, 80, 90, 100, 120, 140, 160, 180, 200, 220, 240, 260, 280, 300, 320, 340, 360, 380, 400, 500, 600 or more contiguous nucleotides or amino acid residues in length, including all integers in between, which comprise or encode a polypeptide having an activity of a reference polynucleotide or polypeptide. Representative biologically active fragments and variants generally participate in an interaction, e.g., an intra-molecular or an inter-molecular interaction. An inter-molecular interaction can be a specific binding interaction or an enzymatic interaction. Examples of enzymatic interactions or activities include, without limitation, acyl-acyl carrier protein reductase activity, acyl carrier protein activity, glycogen breakdown activity, glycogen precursor secretion activity, glucose secretion activity, acetyl-CoA carboxylase activity, aldehyde dehydrogenase activity, alcohol dehydrogenase activity, aldehyde decarbonylase activity, and other enzymatic activities described herein.

[0086] By “coding sequence” is meant any nucleic acid sequence that contributes to the code for the polypeptide product of a gene. By contrast, the term “non-coding sequence” refers to any nucleic acid sequence that does not contribute to the code for the polypeptide product of a gene.

[0087] Throughout this specification, unless the context requires otherwise, the words “comprise”, “comprises” and “comprising” will be understood to imply the inclusion of a stated step or element or group of steps or elements but not the exclusion of any other step or element or group of steps or elements.

[0088] By “consisting of” is meant including, and limited to, whatever follows the phrase “consisting of.” Thus, the phrase “consisting of” indicates that the listed elements are required or mandatory, and that no other elements may be present.

[0089] By “consisting essentially of” is meant including any elements listed after the phrase, and limited to other elements that do not interfere with or contribute to the activity or action specified in the disclosure for the listed elements. Thus, the phrase “consisting essentially of” indicates that the listed elements are required or mandatory, but that other elements are optional and may or may not be present depending upon whether or not they affect the activity or action of the listed elements.

[0090] The terms “complementary” and “complementarity” refer to polynucleotides (i.e., a sequence of nucleotides) related by the base-pairing rules. For example, the sequence “A-G-T,” is complementary to the sequence “T-C-A.” Complementarity may be “partial,” in which only some of the nucleic acids' bases are matched according to the base pairing rules. Or, there may be “complete” or “total” complementarity between the nucleic acids. The degree of complementarity between nucleic acid strands has significant effects on the efficiency and strength of hybridization between nucleic acid strands.

[0091] By “corresponds to” or “corresponding to” is meant (a) a polynucleotide having a nucleotide sequence that is substantially identical or complementary to all or a portion of a reference polynucleotide sequence or encoding an amino acid sequence identical to an amino acid sequence in a peptide or protein; or (b) a peptide or polypeptide having an amino acid sequence that is substantially identical to a sequence of amino acids in a reference peptide or protein.

[0092] By “derivative” is meant a polypeptide that has been derived from the basic sequence by modification, for example by conjugation or complexing with other chemical moieties (e.g., pegylation) or by post-translational modification techniques as would be understood in the art. The term “derivative” also includes within its scope alterations that have been made to a parent sequence including additions or deletions that provide for functionally equivalent molecules.

[0093] By “enzyme reactive conditions” it is meant that any necessary conditions are available in an environment (i.e., such factors as temperature, pH, lack of inhibiting substances) which will permit the enzyme to function. Enzyme reactive conditions can be either in vitro, such as in a test tube, or in vivo, such as within a cell.

[0094] As used herein, an “acyl-acyl carrier protein reductase” (or “acyl-ACP reductase”) includes an enzyme that converts acyl-ACP to acyl-aldehyde.

[0095] As used herein, the terms “function” and “functional” and the like refer to a biological, enzymatic, or therapeutic function.

[0096] By “gene” is meant a unit of inheritance that occupies a specific locus on a chromosome and consists of transcriptional and/or translational regulatory sequences and/or a coding region and/or non-translated sequences (i.e., introns, 5′ and 3′ untranslated sequences).

[0097] “Homology” refers to the percentage number of amino acids that are identical or constitute conservative substitutions. Homology may be determined using sequence comparison programs such as GAP (Deveraux et al., 1984, Nucleic Acids Research 12, 387-395) which is incorporated herein by reference. In this way sequences of a similar or substantially different length to those cited herein could be compared by insertion of gaps into the alignment, such gaps being determined, for example, by the comparison algorithm used by GAP.

[0098] The term “host cell” includes an individual cell or cell culture which can be or has been a recipient of any recombinant vector(s) or isolated polynucleotide of the invention. Host cells include progeny of a single host cell, and the progeny may not necessarily be completely identical (in morphology or in total DNA complement) to the original parent cell due to natural, accidental, or deliberate mutation and/or change. A host cell includes cells transfected or infected in vivo or in vitro with a recombinant vector or a polynucleotide of the invention. A host cell which comprises a recombinant vector of the invention is a recombinant host cell.

[0099] By “isolated” is meant material that is substantially or essentially free from components that normally accompany it in its native state. For example, an “isolated polynucleotide”, as used herein, refers to a polynucleotide, which has been purified from the sequences which flank it in a naturally-occurring state, e.g., a DNA fragment which has been removed from the sequences that are normally adjacent to the fragment. Alternatively, an “isolated peptide” or an “isolated polypeptide” and the like, as used herein, refer to in vitro isolation and/or purification of a peptide or polypeptide molecule from its natural cellular environment, and from association with other components of the cell.

[0100] The terms “modulating” and “altering” include “increasing” and “enhancing” as well as “decreasing” or “reducing,” typically in a statistically significant or a physiologically significant amount or degree relative to a control. By “increased” or “increasing” is included the ability of one or more modified photosynthetic microorganisms, e.g., Cyanobacteria, to produce (e.g., intracellularly accumulate and/or secrete) a greater amount of one or more carbon-containing compounds when grown under a stress condition, relative to a control photosynthetic microorganism, typically of the same species, such as an unmodified (wild-type) photosynthetic microorganism or a differently modified photosynthetic microorganism grown under that same or a similar stress condition, or relative to the same or a similarly modified photosynthetic microorganism grown under a non-stress condition. In particular embodiments, the stress condition is reduced levels or absence of at least one essential nutrient, and the comparative non-stress condition is a replete condition of the same or all essential nutrient(s). Examples of carbon-containing compounds are described herein.

[0101] For lipids, included are increases in total lipids, total fatty acids, total free fatty acids, total intracellular fatty acids, and/or total secreted fatty acids, separately or together. For instance, in certain embodiments, total lipids may increase, with either corresponding increases in all types of lipids, or relative increases in one or more specific types of lipid (e.g., fatty acids, free fatty acids, secreted fatty acids, triglycerides, wax esters). In certain embodiments, total lipids may increase or they may stay the same (i.e., total lipids are not significantly increased compared to an unmodified microorganism of the same type), and the production or storage of fatty acids (e.g., free fatty acids, secreted fatty acids) may increase relative to other lipids. In particular embodiments, the production or storage of one or more selected types of fatty acids (e.g., secreted fatty acids, free fatty acids, intracellular fatty acids, specific fatty acids such as C14:0, C14:1, C16:0, C16:1n9, and C18:0 fatty acids) may increase relative to other types of fatty acids (e.g., secreted fatty acids, free fatty acids, intracellular fatty acids, specific fatty acids such as C14:0, C14:1, C16:0, C16:1n9, and C18:0 fatty acids).

[0102] An “increased” or “enhanced” amount is typically a “statistically significant” amount, and may include an increase that is 1.1, 1.2, 1.3, 1.4, 1.5, 1.6 1.7, 1.8, 1.9, 2, 2.5, 3, 3.5, 4, 4.5, 5, 6, 7, 8, 9, 10, 15, 20, 30, 40, or 50 or more times (e.g., 100, 500, 1000 times) (including all integers and decimal points in between and above 1, e.g., 1.5, 1.6, 1.7. 1.8, etc.) an amount or level described herein. Certain examples include the amount of carbon-containing compound produced by a corresponding unmodified microorganism or differently modified microorganism grown under the stress condition, or an amount produced by a corresponding modified photosynthetic microorganism grown under non-stress conditions. In specific embodiments, production or storage of a one or more carbon-containing compounds described herein, such as total lipids, total triglycerides, total fatty acids, total free fatty acids, selected fatty acids (e.g., C16:0) total intracellular fatty acids, total secreted fatty acids, and/or total wax esters, is increased relative to an unmodified or differently modified microorganism (e.g., for triglycerides, a DGAT-only expressing strain) grown under the stress condition, or relative to an amount produced by a corresponding modified photosynthetic microorganism grown under non-stress conditions, as described above, or by at least 10%, at least 15%, at least 20%, at least 25%, at least 30%, at least 40%, at least 50%, at least 60%, at least 70%, at least 80%, at least 90%, at least 100%, at least 150%, at least 200%, at least 300%, at least 400%, at least 500%, or at least 1000%. In certain embodiments, production or storage of total carbon-containing compounds such as total lipids, total triglycerides, total fatty acids, total free fatty acids, total intracellular fatty acids, total secreted fatty acids, and/or total wax esters is increased by about 50% to 200%.

[0103] Production of lipids such as fatty acids can be measured according to techniques known in the art, such as Nile Red staining, thin layer chromatography and gas chromatography. Production of triglycerides can be measured, for example, using commercially available enzymatic tests, including colorimetric enzymatic tests using glycerol-3-phosphate-oxidase. Production of free fatty acids can be measured in absolute units such as overall accumulation of FAMES (e.g., OD/ml, μg/ml) or in units that reflect the production of FAMES over time, i.e., the rate of FAMES production (e.g., OD/ml/day, μg/ml/day). For example, certain modified microorganisms described herein may produce at least about 20, 21, 22, 23, 24, 25, 26, 27, 28, 29, 30, 31, 32, 33, 34, 35, 36, 37, 38, 39, 40, 41, 42, 43, 44, 45, 46, 47, 48, 49, 50 μg/mL/day; and/or in the range of at least about 20-30, 20-35, 20-40, 20-45, 20-50, 25-30, 25-35, 25-40, 25-45, 25-50, 30-35, 30-40, 30-45, 30-50, 35-40, 35-45, 35-50, 40-45, or 40-50 μg/mL/day. Production of TAGs can be measured similarly.

[0104] A “decreased” or “reduced” or “lesser” amount is typically a “statistically significant” amount, and may include a decrease that is about 1.1, 1.2, 1.3, 1.4, 1.5, 1.6 1.7, 1.8, 1.9, 2, 2.5, 3, 3.5, 4, 4.5, 5, 6, 7, 8, 9, 10, 15, 20, 30, 40, or 50 or more times (e.g., 100, 500, 1000 times) (including all integers and decimal points in between and above 1, e.g., 1.5, 1.6, 1.7. 1.8, etc.) an amount or level described herein. In certain instances, by “decreased” or “reduced” is included the ability of one or more modified photosynthetic microorganisms, e.g., Cyanobacteria, to produce or accumulate under a stress condition a lesser amount (e.g., a statistically significant amount) of glycogen or glycogen precursor or related molecule (see FIG. 21), as compared to a control photosynthetic microorganism grown under the same or comparable stress condition, such as an unmodified or wild-type Cyanobacteria or a differently modified Cyanobacteria. Production of glycogen and related molecules can be measured according to techniques known in the art (see Suzuki et al., Biochimica et Biophysica Acta 1770:763-773, 2007). In certain instances, by “decreased” or “reduced” is meant a lesser level of expression (e.g., a statistically significant amount), by a modified photosynthetic microorganism, e.g., Cyanobacteria, of one or more genes associated with a glycogen biosynthesis or storage pathway, as compared to the level of expression in a control photosynthetic microorganism, such as an unmodified Cyanobacteria or a differently modified Cyanobacteria. In particular embodiments, production or accumulation of glycogen or glycogen precursor or related molecule, and/or expression of one or more genes associated with glycogen biosynthesis or storage, is reduced by at least 10%, at least 20%, at least 30%, at least 40%, at least 50%, at least 60%, at least 70%, at least 80%, at least 90%, or 100%. In particular embodiments, production or accumulation of glycogen or glycogen precursor or related molecule, and/or expression of one or more genes associated with glycogen biosynthesis or storage, is reduced by about 50-100%.

[0105] Examples of “carbon-containing compounds” include specialty chemicals and associated precursors such as lipids (e.g., fatty aldehydes, fatty acids, free fatty acids, triglycerides, wax esters, fatty alcohols, alkanes), 2-oxoglutarate, malate, fumarate, succinate, 3-methyl-2-oxobutyrate, 3-methyl-2-oxovalerate, 4-methyl-2-oxopentanoate, glucose, glutathione, 3-phosphoglycerate, cis-aconitate, pyruvate, 4-hydroxy-2-oxoglutaric acid, 3-P-glycerate, acetyl CoA, aconinate, 4-hydroxybutyrate, 1,4-butanediol, glutaconic acid, isobutyraldehyde, isobutanol, isopentanol, 2-methyl-1-butanol, 3-methyl-1-butanol, and polyamine intermediates such as agmatine and putrescine.

[0106] Additional examples of carbon-containing compounds or specialty chemicals and associated precursors include ethanol, biodiesel, methane, methanol, ethane, ethene, n-propane, 1-propene, 1-propanol, propanal, acetone, propionate, n-butane, 1-butene, 1-butanol, butanal, butanoate, isobutanal, isobutanol, 2-methylbutanal, 2-methylbutanol, 3-methylbutanal, 3-methylbutanol, 2-butene, 2-butanol, 2-butanone, 2,3-butanediol, 3-hydroxy-2-butanone, 2,3-butanedione, ethylbenzene, ethenylbenzene, 2-phenylethanol, phenylacetaldehyde, 1-phenylbutane, 4-phenyl-1-butene, 4-phenyl-2-butene, 1-phenyl-2-butene, 1-phenyl-2-butanol, 4-phenyl-2-butanol, 1-phenyl-2-butanone, 4-phenyl-2-butanone, 1-phenyl-2,3-butandiol, 1-phenyl-3-hydroxy-2-butanone, 4-phenyl-3-hydroxy-2-butanone, 1-phenyl-2,3-butanedione, n-pentane, ethylphenol, ethenylphenol, 2-(4-hydroxyphenyl)ethanol, 1-(4-hydroxyphenyl)butane, 4-(4-hydroxyphenyl)-1-butene, 4-(4-hydroxyphenyl)-2-butene, 1-(4-hydroxyphenyl)-1-butene, 1-(4-hydroxyphenyl)-2-butanol, 4-(4-hydroxyphenyl)-2-butanol, 1-(4-hydroxyphenyl)-2-butanone, 4-(4-hydroxyphenyl)-2-butanone, 1-(4-hydroxyphenyl)-2,3-butandiol, 1-(4-hydroxyphenyl)-3-hydroxy-2-butanone, 4-(4-hydroxyphenyl)-3-hydroxy-2-butanone, 1-(4-hydroxyphenyl)-2,3-butanonedione, indolylethane, indolylethene, 2-(indole-3-) ethanol, n-pentane, 1-pentene, 1-pentanol, pentanal, pentanoate, 2-pentene, 2-pentanol, 3-pentanol, 2-pentanone, 3-pentanone, 4-methylpentanal, 4-methylpentanol, 2,3-pentanediol, 2-hydroxy-3-pentanone, 3-hydroxy-2-pentanone, 2,3-pentanedione, 2-methylpentane, 4-methyl-1-pentene, 4-methyl-2-pentene, 4-methyl-3-pentene, 4-methyl-2-pentanol, 2-methyl-3-pentanol, 4-methyl-2-pentanone, 2-methyl-3-pentanone, 4-methyl-2,3-pentanediol, 4-methyl-2-hydroxy-3-pentanone, 4-methyl-3-hydroxy-2-pentanone, 4-methyl-2,3-pentanedione, 1-phenylpentane, 1-phenyl-1-pentene, 1-phenyl-2-pentene, 1-phenyl-3-pentene, 1-phenyl-2-pentanol, 1-phenyl-3-pentanol, 1-phenyl-2-pentanone, 1-phenyl-3-pentanone, 1-phenyl-2,3-pentanediol, 1-phenyl-2-hydroxy-3-pentanone, 1-phenyl-3-hydroxy-2-pentanone, 1-phenyl-2,3-pentanedione, 4-methyl-1-phenylpentane, 4-methyl-1-phenyl-1-pentene, 4-methyl-1-phenyl-2-pentene, 4-methyl-1-phenyl-3-pentene, 4-methyl-1-phenyl-3-pentanol, 4-methyl-1-phenyl-2-pentanol, 4-methyl-1-phenyl-3-pentanone, 4-methyl-1-phenyl-2-pentanone, 4-methyl-1-phenyl-2,3-pentanediol, 4-methyl-1-phenyl-2,3-pentanedione, 4-methyl-1-phenyl-3-hydroxy-2-pentanone, 4-methyl-1-phenyl-2-hydroxy-3-pentanone, 1-(4-hydroxyphenyl)pentane, 1-(4-hydroxyphenyl)-1-pentene, 1-(4-hydroxyphenyl)-2-pentene, 1-(4-hydroxyphenyl)-3-pentene, 1-(4-hydroxyphenyl)-2-pentanol, 1-(4-hydroxyphenyl)-3-pentanol, 1-(4-hydroxyphenyl)-2-pentanone, 1-(4-hydroxyphenyl)-3-pentanone, 1-(4-hydroxyphenyl)-2,3-pentanediol, 1-(4-hydroxyphenyl)-2-hydroxy-3-pentanone, 1-(4-hydroxyphenyl)-3-hydroxy-2-pentanone, 1-(4-hydroxyphenyl)-2,3-pentanedione, 4-methyl-1-(4-hydroxyphenyl)pentane, 4-methyl-1-(4-hydroxyphenyl)-2-pentene, 4-methyl-1-(4-hydroxyphenyl)-3-pentene, 4-methyl-1-(4-hydroxyphenyl)-1-pentene, 4-methyl-1-(4-hydroxyphenyl)-3-pentanol, 4-methyl-1-(4-hydroxyphenyl)-2-pentanol, 4-methyl-1-(4-hydroxyphenyl)-3-pentanone, 4-methyl-1-(4-hydroxyphenyl)-2-pentanone, 4-methyl-1-(4-hydroxyphenyl)-2,3-pentanediol, 4-methyl-1-(4-hydroxyphenyl)-2,3-pentanedione, 4-methyl-1-(4-hydroxyphenyl)-3-hydroxy-2-pentanone, 4-methyl-1-(4-hydroxyphenyl)-2-hydroxy-3-pentanone, 1-indole-3-pentane, 1-(indole-3)-1-pentene, 1-(indole-3)-2-pentene, 1-(indole-3)-3-pentene, 1-(indole-3)-2-pentanol, 1-(indole-3)-3-pentanol, 1-(indole-3)-2-pentanone, 1-(indole-3)-3-pentanone, 1-(indole-3)-2,3-pentanediol, 1-(indole-3)-2-hydroxy-3-pentanone, 1-(indole-3)-3-hydroxy-2-pentanone, 1-(indole-3)-2,3-pentanedione, 4-methyl-1-(indole-3-)pentane, 4-methyl-1-(indole-3)-2-pentene, 4-methyl-1-(indole-3)-3-pentene, 4-methyl-1-(indole-3)-1-pentene, 4-methyl-2-(indole-3)-3-pentanol, 4-methyl-1-(indole-3)-2-pentanol, 4-methyl-1-(indole-3)-3-pentanone, 4-methyl-1-(indole-3)-2-pentanone, 4-methyl-1-(indole-3)-2,3-pentanediol, 4-methyl-1-(indole-3)-2,3-pentanedione, 4-methyl-1-(indole-3)-3-hydroxy-2-pentanone, 4-methyl-1-(indole-3)-2-hydroxy-3-pentanone, n-hexane, 1-hexene, 1-hexanol, hexanal, hexanoate, 2-hexene, 3-hexene, 2-hexanol, 3-hexanol, 2-hexanone, 3-hexanone, 2,3-hexanediol, 2,3-hexanedione, 3,4-hexanediol, 3,4-hexanedione, 2-hydroxy-3-hexanone, 3-hydroxy-2-hexanone, 3-hydroxy-4-hexanone, 4-hydroxy-3-hexanone, 2-methylhexane, 3-methylhexane, 2-methyl-2-hexene, 2-methyl-3-hexene, 5-methyl-1-hexene, 5-methyl-2-hexene, 4-methyl-1-hexene, 4-methyl-2-hexene, 3-methyl-3-hexene, 3-methyl-2-hexene, 3-methyl-1-hexene, 2-methyl-3-hexanol, 5-methyl-2-hexanol, 5-methyl-3-hexanol, 2-methyl-3-hexanone, 5-methyl-2-hexanone, 5-methyl-3-hexanone, 2-methyl-3,4-hexanediol, 2-methyl-3,4-hexanedione, 5-methyl-2,3-hexanediol, 5-methyl-2,3-hexanedione, 4-methyl-2,3-hexanediol, 4-methyl-2,3-hexanedione, 2-methyl-3-hydroxy-4-hexanone, 2-methyl-4-hydroxy-3-hexanone, 5-methyl-2-hydroxy-3-hexanone, 5-methyl-3-hydroxy-2-hexanone, 4-methyl-2-hydroxy-3-hexanone, 4-methyl-3-hydroxy-2-hexanone, 2,5-dimethylhexane, 2,5-dimethyl-2-hexene, 2,5-dimethyl-3-hexene, 2,5-dimethyl-3-hexanol, 2,5-dimethyl-3-hexanone, 2,5-dimethyl-3,4-hexanediol, 2,5-dimethyl-3,4-hexanedione, 2,5-dimethyl-3-hydroxy-4-hexanone, 5-methyl-1-phenylhexane, 4-methyl-1-phenylhexane, 5-methyl-1-phenyl-1-hexene, 5-methyl-1-phenyl-2-hexene, 5-methyl-1-phenyl-3-hexene, 4-methyl-1-phenyl-1-hexene, 4-methyl-1-phenyl-2-hexene, 4-methyl-1-phenyl-3-hexene, 5-methyl-1-phenyl-2-hexanol, 5-methyl-1-phenyl-3-hexanol, 4-methyl-1-phenyl-2-hexanol, 4-methyl-1-phenyl-3-hexanol, 5-methyl-1-phenyl-2-hexanone, 5-methyl-1-phenyl-3-hexanone, 4-methyl-1-phenyl-2-hexanone, 4-methyl-1-phenyl-3-hexanone, 5-methyl-1-phenyl-2,3-hexanediol, 4-methyl-1-phenyl-2,3-hexanediol, 5-methyl-1-phenyl-3-hydroxy-2-hexanone, 5-methyl-1-phenyl-2-hydroxy-3-hexanone, 4-methyl-1-phenyl-3-hydroxy-2-hexanone, 4-methyl-1-phenyl-2-hydroxy-3-hexanone, 5-methyl-1-phenyl-2,3-hexanedione, 4-methyl-1-phenyl-2,3-hexanedione, 4-methyl-1-(4-hydroxyphenyl)hexane, 5-methyl-1-(4-hydroxyphenyl)-1-hexene, 5-methyl-1-(4-hydroxyphenyl)-2-hexene, 5-methyl-1-(4-hydroxyphenyl)-3-hexene, 4-methyl-1-(4-hydroxyphenyl)-1-hexene, 4-methyl-1-(4-hydroxyphenyl)-2-hexene, 4-methyl-1-(4-hydroxyphenyl)-3-hexene, 5-methyl-1-(4-hydroxyphenyl)-2-hexanol, 5-methyl-1-(4-hydroxyphenyl)-3-hexanol, 4-methyl-1-(4-hydroxyphenyl)-2-hexanol, 4-methyl-1-(4-hydroxyphenyl)-3-hexanol, 5-methyl-1-(4-hydroxyphenyl)-2-hexanone, 5-methyl-1-(4-hydroxyphenyl)-3-hexanone, 4-methyl-1-(4-hydroxyphenyl)-2-hexanone, 4-methyl-1-(4-hydroxyphenyl)-3-hexanone, 5-methyl-1-(4-hydroxyphenyl)-2,3-hexanediol, 4-methyl-1-(4-hydroxyphenyl)-2,3-hexanediol, 5-methyl-1-(4-hydroxyphenyl)-3-hydroxy-2-hexanone, 5-methyl-1-(4-hydroxyphenyl)-2-hydroxy-3-hexanone, 4-methyl-1-(4-hydroxyphenyl)-3-hydroxy-2-hexanone, 4-methyl-1-(4-hydroxyphenyl)-2-hydroxy-3-hexanone, 5-methyl-1-(4-hydroxyphenyl)-2,3-hexanedione, 4-methyl-1-(4-hydroxyphenyl)-2,3-hexanedione, 4-methyl-1-(indole-3-)hexane, 5-methyl-1-(indole-3)-1-hexene, 5-methyl-1-(indole-3)-2-hexene, 5-methyl-1-(indole-3)-3-hexene, 4-methyl-1-(indole-3)-1-hexene, 4-methyl-1-(indole-3)-2-hexene, 4-methyl-1-(indole-3)-3-hexene, 5-methyl-1-(indole-3)-2-hexanol, 5-methyl-1-(indole-3)-3-hexanol, 4-methyl-1-(indole-3)-2-hexanol, 4-methyl-1-(indole-3)-3-hexanol, 5-methyl-1-(indole-3)-2-hexanone, 5-methyl-1-(indole-3)-3-hexanone, 4-methyl-1-(indole-3)-2-hexanone, 4-methyl-1-(indole-3)-3-hexanone, 5-methyl-1-(indole-3)-2,3-hexanediol, 4-methyl-1-(indole-3)-2,3-hexanediol, 5-methyl-1-(indole-3)-3-hydroxy-2-hexanone, 5-methyl-1-(indole-3)-2-hydroxy-3-hexanone, 4-methyl-1-(indole-3)-3-hydroxy-2-hexanone, 4-methyl-1-(indole-3)-2-hydroxy-3-hexanone, 5-methyl-1-(indole-3)-2,3-hexanedione, 4-methyl-1-(indole-3)-2,3-hexanedione, n-heptane, 1-heptene, 1-heptanol, heptanal, heptanoate, 2-heptene, 3-heptene, 2-heptanol, 3-heptanol, 4-heptanol, 2-heptanone, 3-heptanone, 4-heptanone, 2,3-heptanediol, 2,3-heptanedione, 3,4-heptanediol, 3,4-heptanedione, 2-hydroxy-3-heptanone, 3-hydroxy-2-heptanone, 3-hydroxy-4-heptanone, 4-hydroxy-3-heptanone, 2-methylheptane, 3-methylheptane, 6-methyl-2-heptene, 6-methyl-3-heptene, 2-methyl-3-heptene, 2-methyl-2-heptene, 5-methyl-2-heptene, 5-methyl-3-heptene, 3-methyl-3-heptene, 2-methyl-3-heptanol, 2-methyl-4-heptanol, 6-methyl-3-heptanol, 5-methyl-3-heptanol, 3-methyl-4-heptanol, 2-methyl-3-heptanone, 2-methyl-4-heptanone, 6-methyl-3-heptanone, 5-methyl-3-heptanone, 3-methyl-4-heptanone, 2-methyl-3,4-heptanediol, 2-methyl-3,4-heptanedione, 6-methyl-3,4-heptanediol, 6-methyl-3,4-heptanedione, 5-methyl-3,4-heptanediol, 5-methyl-3,4-heptanedione, 2-methyl-3-hydroxy-4-heptanone, 2-methyl-4-hydroxy-3-heptanone, 6-methyl-3-hydroxy-4-heptanone, 6-methyl-4-hydroxy-3-heptanone, 5-methyl-3-hydroxy-4-heptanone, 5-methyl-4-hydroxy-3-heptanone, 2,6-dimethylheptane, 2,5-dimethylheptane, 2,6-dimethyl-2-heptene, 2,6-dimethyl-3-heptene, 2,5-dimethyl-2-heptene, 2,5-dimethyl-3-heptene, 3,6-dimethyl-3-heptene, 2,6-dimethyl-3-heptanol, 2,6-dimethyl-4-heptanol, 2,5-dimethyl-3-heptanol, 2,5-dimethyl-4-heptanol, 2,6-dimethyl-3,4-heptanediol, 2,6-dimethyl-3,4-heptanedione, 2,5-dimethyl-3,4-heptanediol, 2,5-dimethyl-3,4-heptanedione, 2,6-dimethyl-3-hydroxy-4-heptanone, 2,6-dimethyl-4-hydroxy-3-heptanone, 2,5-dimethyl-3-hydroxy-4-heptanone, 2,5-dimethyl-4-hydroxy-3-heptanone, n-octane, 1-octene, 2-octene, 1-octanol, octanal, octanoate, 3-octene, 4-octene, 4-octanol, 4-octanone, 4,5-octanediol, 4,5-octanedione, 4-hydroxy-5-octanone, 2-methyloctane, 2-methyl-3-octene, 2-methyl-4-octene, 7-methyl-3-octene, 3-methyl-3-octene, 3-methyl-4-octene, 6-methyl-3-octene, 2-methyl-4-octanol, 7-methyl-4-octanol, 3-methyl-4-octanol, 6-methyl-4-octanol, 2-methyl-4-octanone, 7-methyl-4-octanone, 3-methyl-4-octanone, 6-methyl-4-octanone, 2-methyl-4,5-octanediol, 2-methyl-4,5-octanedione, 3-methyl-4,5-octanediol, 3-methyl-4,5-octanedione, 2-methyl-4-hydroxy-5-octanone, 2-methyl-5-hydroxy-4-octanone, 3-methyl-4-hydroxy-5-octanone, 3-methyl-5-hydroxy-4-octanone, 2,7-dimethyloctane, 2,7-dimethyl-3-octene, 2,7-dimethyl-4-octene, 2,7-dimethyl-4-octanol, 2,7-dimethyl-4-octanone, 2,7-dimethyl-4,5-octanediol, 2,7-dimethyl-4,5-octanedione, 2,7-dimethyl-4-hydroxy-5-octanone, 2,6-dimethyloctane, 2,6-dimethyl-3-octene, 2,6-dimethyl-4-octene, 3,7-dimethyl-3-octene, 2,6-dimethyl-4-octanol, 3,7-dimethyl-4-octanol, 2,6-dimethyl-4-octanone, 3,7-dimethyl-4-octanone, 2,6-dimethyl-4,5-octanediol, 2,6-dimethyl-4,5-octanedione, 2,6-dimethyl-4-hydroxy-5-octanone, 2,6-dimethyl-5-hydroxy-4-octanone, 3,6-dimethyloctane, 3,6-dimethyl-3-octene, 3,6-dimethyl-4-octene, 3,6-dimethyl-4-octanol, 3,6-dimethyl-4-octanone, 3,6-dimethyl-4,5-octanediol, 3,6-dimethyl-4,5-octanedione, 3,6-dimethyl-4-hydroxy-5-octanone, n-nonane, 1-nonene, 1-nonanol, nonanal, nonanoate, 2-methylnonane, 2-methyl-4-nonene, 2-methyl-5-nonene, 8-methyl-4-nonene, 2-methyl-5-nonanol, 8-methyl-4-nonanol, 2-methyl-5-nonanone, 8-methyl-4-nonanone, 8-methyl-4,5-nonanediol, 8-methyl-4,5-nonanedione, 8-methyl-4-hydroxy-5-nonanone, 8-methyl-5-hydroxy-4-nonanone, 2,8-dimethylnonane, 2,8-dimethyl-3-nonene, 2,8-dimethyl-4-nonene, 2,8-dimethyl-5-nonene, 2,8-dimethyl-4-nonanol, 2,8-dimethyl-5-nonanol, 2,8-dimethyl-4-nonanone, 2,8-dimethyl-5-nonanone, 2,8-dimethyl-4,5-nonanediol, 2,8-dimethyl-4,5-nonanedione, 2,8-dimethyl-4-hydroxy-5-nonanone, 2,8-dimethyl-5-hydroxy-4-nonanone, 2,7-dimethylnonane, 3,8-dimethyl-3-nonene, 3,8-dimethyl-4-nonene, 3,8-dimethyl-5-nonene, 3,8-dimethyl-4-nonanol, 3,8-dimethyl-5-nonanol, 3,8-dimethyl-4-nonanone, 3,8-dimethyl-5-nonanone, 3,8-dimethyl-4,5-nonanediol, 3,8-dimethyl-4,5-nonanedione, 3,8-dimethyl-4-hydroxy-5-nonanone, 3,8-dimethyl-5-hydroxy-4-nonanone, n-decane, 1-decene, 1-decanol, decanoate, 2,9-dimethyldecane, 2,9-dimethyl-3-decene, 2,9-dimethyl-4-decene, 2,9-dimethyl-5-decanol, 2,9-dimethyl-5-decanone, 2,9-dimethyl-5,6-decanediol, 2,9-dimethyl-6-hydroxy-5-decanone, 2,9-dimethyl-5,6-decanedionen-undecane, 1-undecene, 1-undecanol, undecanal. undecanoate, n-dodecane, 1-dodecene, 1-dodecanol, dodecanal, dodecanoate, n-dodecane, 1-decadecene, 1-dodecanol, ddodecanal, dodecanoate, n-tridecane, 1-tridecene, 1-tridecanol, tridecanal, tridecanoate, n-tetradecane, 1-tetradecene, 1-tetradecanol, tetradecanal, tetradecanoate, n-pentadecane, 1-pentadecene, 1-pentadecanol, pentadecanal, pentadecanoate, n-hexadecane, 1-hexadecene, 1-hexadecanol, hexadecanal, hexadecanoate, n-heptadecane, 1-heptadecene, 1-heptadecanol, heptadecanal, heptadecanoate, n-octadecane, 1-octadecene, 1-octadecanol, octadecanal, octadecanoate, n-nonadecane, 1-nonadecene, 1-nonadecanol, nonadecanal, nonadecanoate, eicosane, 1-eicosene, 1-eicosanol, eicosanal, eicosanoate, 3-hydroxy propanal, 1,3-propanediol, 4-hydroxybutanal, 1,4-butanediol, 3-hydroxy-2-butanone, 2,3-butandiol, 1,5-pentane diol, homocitrate, homoisocitorate, b-hydroxy adipate, glutarate, glutarsemialdehyde, glutaraldehyde, 2-hydroxy-1-cyclopentanone, 1,2-cyclopentanediol, cyclopentanone, cyclopentanol, (S)-2-acetolactate, (R)-2,3-Dihydroxy-isovalerate, 2-oxoisovalerate, isobutyryl-CoA, isobutyrate, isobutyraldehyde, 5-amino pentaldehyde, 1,10-diaminodecane, 1,10-diamino-5-decene, 1,10-diamino-5-hydroxydecane, 1,10-diamino-5-decanone, 1,10-diamino-5,6-decanediol, 1,10-diamino-6-hydroxy-5-decanone, phenylacetoaldehyde, 1,4-diphenylbutane, 1,4-diphenyl-1-butene, 1,4-diphenyl-2-butene, 1,4-diphenyl-2-butanol, 1,4-diphenyl-2-butanone, 1,4-diphenyl-2,3-butanediol, 1,4-diphenyl-3-hydroxy-2-butanone, 1-(4-hydeoxyphenyl)-4-phenylbutane, 1-(4-hydeoxyphenyl)-4-phenyl-1-butene, 1-(4-hydeoxyphenyl)-4-phenyl-2-butene, 1-(4-hydeoxyphenyl)-4-phenyl-2-butanol, 1-(4-hydeoxyphenyl)-4-phenyl-2-butanone, 1-(4-hydeoxyphenyl)-4-phenyl-2,3-butanediol, 1-(4-hydeoxyphenyl)-4-phenyl-3-hydroxy-2-butanone, 1-(indole-3)-4-phenylbutane, 1-(indole-3)-4-phenyl-1-butene, 1-(indole-3)-4-phenyl-2-butene, 1-(indole-3)-4-phenyl-2-butanol, 1-(indole-3)-4-phenyl-2-butanone, 1-(indole-3)-4-phenyl-2,3-butanediol, 1-(indole-3)-4-phenyl-3-hydroxy-2-butanone, 4-hydroxyphenylacetoaldehyde, 1,4-di(4-hydroxyphenyl)butane, 1,4-di(4-hydroxyphenyl)-1-butene, 1,4-di(4-hydroxyphenyl)-2-butene, 1,4-di(4-hydroxyphenyl)-2-butanol, 1,4-di(4-hydroxyphenyl)-2-butanone, 1,4-di(4-hydroxyphenyl)-2,3-butanediol, 1,4-di(4-hydroxyphenyl)-3-hydroxy-2-butanone, 1-(4-hydroxyphenyl)-4-(indole-3-)butane, 1-(4-hydroxyphenyl)-4-(indole-3)-1-butene, 1-di(4-hydroxyphenyl)-4-(indole-3)-2-butene, 1-(4-hydroxyphenyl)-4-(indole-3)-2-butanol, 1-(4-hydroxyphenyl)-4-(indole-3)-2-butanone, 1-(4-hydroxyphenyl)-4-(indole-3)-2,3-butanediol, 1-(4-hydroxyphenyl-4-(indole-3)-3-hydroxy-2-butanone, indole-3-acetoaldehyde, 1,4-di(indole-3-)butane, 1,4-di(indole-3)-1-butene, 1,4-di(indole-3)-2-butene, 1,4-di(indole-3)-2-butanol, 1,4-di(indole-3)-2-butanone, 1,4-di(indole-3)-2,3-butanediol, 1,4-di(indole-3)-3-hydroxy-2-butanone, succinate semialdehyde, hexane-1,8-dicarboxylic acid, 3-hexene-1,8-dicarboxylic acid, 3-hydroxy-hexane-1,8-dicarboxylic acid, 3-hexanone-1,8-dicarboxylic acid, 3,4-hexanediol-1,8-dicarboxylic acid, 4-hydroxy-3-hexanone-1,8-dicarboxylic acid, fucoidan, chlorophyll, carotenoid, and the like.

[0107] “Stress conditions” refer to any condition or combination thereof that imposes a stress upon the Cyanobacteria, including environmental, physical, and/or genetic stresses, and which reduces biomass accumulation, cell division, or both. Under stress conditions, biomass accumulation and/or cell division of a photosynthetic microorganism can be reduced by at least about 10%, 15%, 20%, 25%, 30%, 35%, 40%, 45%, 50%, 55%, 60%, 65%, 70%, 75%, 80%, 85%, 90%, 95%, 98%, 99%, or 100% relative to a corresponding photosynthetic microorganism grown under non-stress conditions.

[0108] Examples of stresses include but are not limited to: reduced or increased temperature as compared to standard; nutrient deprivation, e.g., reduced levels or absence of one or more essential nutrients such as nitrogen, sulfur, phosphorous, and/or phosphate; reduced or increased CO₂ levels as compared to a standard; reduced or increased light exposure, e.g., intensity or duration, as compared to standard; exposure to reduced or increased nitrogen, iron, sulfur, phosphorus, and/or copper as compared to standard; altered pH, e.g., more or less acidic or basic, as compared to standard; altered salt conditions as compared to standard; exposure to an agent that causes DNA synthesis inhibitor or protein synthesis inhibition; increased or decreased culture density as compared to standard; introduced or overexpressed polynucleotides encoding one or more polypeptides associated with reduction of biomass accumulation, cell division, or division as compared to a wild-type photosynthetic microorganism; and altered expression of one or more polypeptides associated with reduction of biomass accumulation, cell division, or division as compared to a wild-type photosynthetic microorganism. Standard growth and culture conditions (e.g., non-stress conditions) for various Cyanobacteria are known in the art.

[0109] “Reduced nitrogen conditions,” or conditions of “nitrogen limitation,” refer generally to culture conditions in which a certain fraction or percentage of a standard nitrogen concentration is present in the culture media. Such fractions typically include, but are not limited to, about 1/50, 1/40, 1/30, 1/10, ⅕, ¼, or about ½ the standard nitrogen conditions. Such percentages typically include, but are not limited to, less than about 1%, 2%, 3%, 4%, 5%, 6%, 7%, 8%, 9%, 10%, 15%, 20%, 30%, 40%, or 50% the standard nitrogen conditions. “Standard” nitrogen conditions can be estimated, for example, by the amount of nitrogen present in BG11 media, as exemplified herein and known in the art. For instance, BG11 media usually contains nitrogen in the form of NaNO₃ at a concentration of about 1.5 grams/liter (see, e.g., Rippka et al., J. Gen Microbiol. 111:1-61, 1979).

[0110] The term “maintenance of photosynthetic activity” under stress conditions includes, for instance, where photosynthetic activity of a modified photosynthetic microorganism (that accumulates a reduced amount of glycogen as compared to the wild-type photosynthetic microorganism) under a given stress condition is substantially greater than photosynthetic activity of a corresponding wild-type photosynthetic microorganism (e.g., of the same genus/species) under the same or comparable stress condition. Also included is where the photosynthetic activity of a modified photosynthetic microorganism (that accumulates a reduced amount of glycogen as compared to the wild-type photosynthetic microorganism) under a given stress condition is at least about 20% of its photosynthetic activity under non-stress conditions. In these and related embodiments, the photosynthetic activity (for comparison) can be measured, for example, at about day 2, 3, 4, 5, 6, 7, 8, 9, 10, 11, 12, 13, 14, 15, 16, 17, 18, 19, 20, or 21 post-initiation or re-initiation of the stress condition, including all ranges in between.

[0111] By “obtained from” is meant that a sample such as, for example, a polynucleotide or polypeptide is isolated from, or derived from, a particular source, such as a desired organism or a specific tissue within a desired organism. “Obtained from” can also refer to the situation in which a polynucleotide or polypeptide sequence is isolated from, or derived from, a particular organism or tissue within an organism. For example, a polynucleotide sequence encoding a reference polypeptide described herein may be isolated from a variety of prokaryotic or eukaryotic organisms, or from particular tissues or cells within certain eukaryotic organism.

[0112] The term “operably linked” as used herein means placing a gene under the regulatory control of a promoter, which then controls the transcription and optionally the translation of the gene. In the construction of heterologous promoter/structural gene combinations, it is generally preferred to position the genetic sequence or promoter at a distance from the gene transcription start site that is approximately the same as the distance between that genetic sequence or promoter and the gene it controls in its natural setting; i.e. the gene from which the genetic sequence or promoter is derived. As is known in the art, some variation in this distance can be accommodated without loss of function. Similarly, the preferred positioning of a regulatory sequence element with respect to a heterologous gene to be placed under its control is defined by the positioning of the element in its natural setting; i.e., the gene from which it is derived. “Constitutive promoters” are typically active, i.e., promote transcription, under most conditions. “Inducible promoters” are typically active only under certain conditions, such as in the presence of a given molecule factor (e.g., IPTG) or a given environmental condition (e.g., particular CO₂ concentration, nutrient levels, light, heat). In the absence of that condition, inducible promoters typically do not allow significant or measurable levels of transcriptional activity. For example, inducible promoters may be induced according to temperature, pH, a hormone, a metabolite (e.g., lactose, mannitol, an amino acid), light (e.g., wavelength specific), osmotic potential (e.g., salt induced), a heavy metal, or an antibiotic. Numerous standard inducible promoters will be known to one of skill in the art.

[0113] The recitation “polynucleotide” or “nucleic acid” as used herein designates mRNA, RNA, cRNA, rRNA, cDNA or DNA. The term typically refers to polymeric form of nucleotides of at least 10 bases in length, either ribonucleotides or deoxynucleotides or a modified form of either type of nucleotide. The term includes single and double stranded forms of DNA and RNA.

[0114] The terms “polynucleotide variant” and “variant” and the like refer to polynucleotides displaying substantial sequence identity with a reference polynucleotide sequence or polynucleotides that hybridize with a reference sequence under stringent conditions that are defined hereinafter. These terms also encompass polynucleotides that are distinguished from a reference polynucleotide by the addition, deletion or substitution of at least one nucleotide. Accordingly, the terms “polynucleotide variant” and “variant” include polynucleotides in which one or more nucleotides have been added or deleted, or replaced with different nucleotides. In this regard, it is well understood in the art that certain alterations inclusive of mutations, additions, deletions and substitutions can be made to a reference polynucleotide whereby the altered polynucleotide retains the biological function or activity of the reference polynucleotide, or has increased activity in relation to the reference polynucleotide (i.e., optimized). Polynucleotide variants include, for example, polynucleotides having at least 50% (and at least 51% to at least 99% and all integer percentages in between, e.g., 90%, 95%, or 98%) sequence identity with a reference polynucleotide sequence described herein. The terms “polynucleotide variant” and “variant” also include naturally-occurring allelic variants and orthologs that encode these enzymes.

[0115] With regard to polynucleotides, the term “exogenous” refers to a polynucleotide sequence that does not naturally-occur in a wild-type cell or organism, but is typically introduced into the cell by molecular biological techniques. Examples of exogenous polynucleotides include vectors, plasmids, and/or man-made nucleic acid constructs encoding a desired protein. With regard to polynucleotides, the term “endogenous” or “native” refers to naturally-occurring polynucleotide sequences that may be found in a given wild-type cell or organism. For example, certain Cyanobacterial species do not typically contain a DGAT gene, and, therefore, do not comprise an “endogenous” polynucleotide sequence that encodes a DGAT polypeptide. Also, a particular polynucleotide sequence that is isolated from a first organism and transferred to second organism by molecular biological techniques is typically considered an “exogenous” polynucleotide with respect to the second organism. In specific embodiments, polynucleotide sequences can be “introduced” by molecular biological techniques into a microorganism that already contains such a polynucleotide sequence, for instance, to create one or more additional copies of an otherwise naturally-occurring polynucleotide sequence, and thereby facilitate overexpression of the encoded polypeptide.

[0116] The recitations “mutation” or “deletion,” in relation to the genes of a “glycogen biosynthesis or storage pathway” or certain “lipid biosynthesis proteins,” refer generally to those changes or alterations in a photosynthetic microorganism, e.g., a Cyanobacterium, that render the product of that gene non-functional or having reduced function with respect to the synthesis and/or storage of glycogen or biosynthesis of a given lipid. Examples of such changes or alterations include nucleotide substitutions, deletions, or additions to the coding or regulatory sequences of a targeted gene (e.g., glgA, glgC, pgm, aldehyde dehydrogenase, aldehyde decarbonylase, Aas), in whole or in part, which disrupt, eliminate, down-regulate, or significantly reduce the expression of the polypeptide encoded by that gene, whether at the level of transcription or translation, and/or which produce a relatively inactive (e.g., mutated or truncated) or unstable polypeptide. Techniques for producing such alterations or changes, such as by recombination with a vector having a selectable marker, are exemplified herein and known in the molecular biological art. In particular embodiments, one or more alleles of a gene, e.g., two or all alleles, may be mutated or deleted within a photosynthetic microorganism. In particular embodiments, modified photosynthetic microorganisms, e.g., Cyanobacteria, of the present invention are merodiploids or partial diploids.

[0117] The “deletion” of a targeted gene may also be accomplished by targeting the mRNA of that gene, such as by using various antisense technologies (e.g., antisense oligonucleotides and siRNA) known in the art. Accordingly, targeted genes may be considered “non-functional” when the polypeptide or enzyme encoded by that gene is not expressed by the modified photosynthetic microorganism, or is expressed in negligible amounts, such that the modified photosynthetic microorganism produces or accumulates less of the polypeptide or enzyme product (e.g., glycogen or glycogen precursor or related molecules—see FIG. 21) than an unmodified or differently modified photosynthetic microorganism.

[0118] In certain aspects, a targeted gene may be rendered “non-functional” by changes or mutations at the nucleotide level that alter the amino acid sequence of the encoded polypeptide, such that a modified polypeptide is expressed, but which has reduced function or activity with respect to its enzymatic activity (e.g., glycogen synthesis, glycogen storage, lipid biosynthesis), whether by modifying that polypeptide's active site, its cellular localization, its stability, or other functional features apparent to a person skilled in the art. Such modifications to the coding sequence of a polypeptide involved in glycogen biosynthesis or storage may be accomplished according to known techniques in the art, such as site directed mutagenesis at the genomic level and/or natural selection (i.e., directed evolution) of a given photosynthetic microorganism.

[0119] “Polypeptide,” “polypeptide fragment,” “peptide” and “protein” are used interchangeably herein to refer to a polymer of amino acid residues and to variants and synthetic analogues of the same. Thus, these terms apply to amino acid polymers in which one or more amino acid residues are synthetic non-naturally occurring amino acids, such as a chemical analogue of a corresponding naturally occurring amino acid, as well as to naturally-occurring amino acid polymers. In certain aspects, polypeptides may include enzymatic polypeptides, or “enzymes,” which typically catalyze (i.e., increase the rate of) various chemical reactions.

[0120] The recitation polypeptide “variant” refers to polypeptides that are distinguished from a reference polypeptide sequence by the addition, deletion or substitution of at least one amino acid residue. In certain embodiments, a polypeptide variant is distinguished from a reference polypeptide by one or more substitutions, which may be conservative or non-conservative. In certain embodiments, the polypeptide variant comprises conservative substitutions and, in this regard, it is well understood in the art that some amino acids may be changed to others with broadly similar properties without changing the nature of the activity of the polypeptide. Polypeptide variants also encompass polypeptides in which one or more amino acids have been added or deleted, or replaced with different amino acid residues.

[0121] The term “reference sequence” refers generally to a nucleic acid coding sequence, or amino acid sequence, to which another sequence is being compared. All polypeptide and polynucleotide sequences described herein are included as references sequences, including those described by name (e.g., glycogen synthesis and/or storage genes/proteins, lipid biosynthesis genes/proteins, glycogen breakdown genes/proteins, orf1593, orf0489, orf1594, TesA, ACP, aDGAT) and those described in the Sequence Listing.

[0122] The present invention contemplates the use in the methods described herein of variants of full-length enzymes or reference sequences, for instance, those having acyl-ACP reductase activity, ACP activity, glycogen breakdown activity, diacylglyecerol transferase activity (DGAT), fatty acyl-CoA synthetase activity, aldehyde dehydrogenase activity, alcohol dehydrogenase activity, and/or acetyl-CoA carboxylase activity, among other reference sequences described herein, truncated fragments of these full-length enzymes and polypeptides, variants of truncated fragments, as well as their related biologically active fragments. Typically, biologically active fragments of a polypeptide may participate in an interaction, for example, an intra-molecular or an inter-molecular interaction. An inter-molecular interaction can be a specific binding interaction or an enzymatic interaction (e.g., the interaction can be transient and a covalent bond is formed or broken).

[0123] Biologically active fragments of a polypeptide/enzyme having a selected activity include peptides comprising amino acid sequences sufficiently similar to, or derived from, the amino acid sequences of a (putative) full-length reference polypeptide sequence. Typically, biologically active fragments comprise a domain or motif with at least one activity of a reference sequence or enzyme described herein, such as an acyl-ACP reductase, aldehyde decarbonylase, aldehyde dehydrogenase, alcohol dehydrogenase, ACP polypeptide, DGAT polypeptide, fatty acyl-CoA synthetase polypeptide, acetyl-CoA carboxylase polypeptide, or a polypeptide associated with a glycogen breakdown pathway, and may include one or more (and in some cases all) of the various active domains. A biologically active fragment of such polypeptides can be a polypeptide fragment which is, for example, 10, 11, 12, 13, 14, 15, 16, 17, 18, 19, 20, 21, 22, 23, 24, 25, 26, 27, 28, 29, 30, 40, 50, 60, 70, 80, 90, 100, 110, 120, 130, 140, 150, 160, 170, 180, 190, 200, 220, 240, 260, 280, 300, 320, 340, 360, 380, 400, 450, 500, 600 or more contiguous amino acids, including all integers in between, of a reference polypeptide sequence. In certain embodiments, a biologically active fragment comprises a conserved enzymatic sequence, domain, or motif, as described elsewhere herein and known in the art. Suitably, the biologically-active fragment has no less than about 1%, 10%, 25%, 50% of an activity of the wild-type polypeptide from which it is derived.

[0124] The recitations “sequence identity” or, for example, comprising a “sequence 50% identical to,” as used herein, refer to the extent that sequences are identical on a nucleotide-by-nucleotide basis or an amino acid-by-amino acid basis over a window of comparison. Thus, a “percentage of sequence identity” may be calculated by comparing two optimally aligned sequences over the window of comparison, determining the number of positions at which the identical nucleic acid base (e.g., A, T, C, G, I) or the identical amino acid residue (e.g., Ala, Pro, Ser, Thr, Gly, Val, Leu, Ile, Phe, Tyr, Trp, Lys, Arg, His, Asp, Glu, Asn, Gln, Cys and Met) occurs in both sequences to yield the number of matched positions, dividing the number of matched positions by the total number of positions in the window of comparison (i.e., the window size), and multiplying the result by 100 to yield the percentage of sequence identity. Included are nucleotides and polypeptides having at least about 50%, 55%, 60%, 65%, 70%, 75%, 80%, 85%, 90%, 95%, 97%, 98%, 99% or 100% sequence identity to any of the reference sequences described herein (see, e.g., Sequence Listing), typically where the polypeptide variant maintains at least one biological activity of the reference polypeptide.

[0125] Terms used to describe sequence relationships between two or more polynucleotides or polypeptides include “reference sequence”, “comparison window”, “sequence identity”, “percentage of sequence identity” and “substantial identity”. A “reference sequence” is at least 12 but frequently 15 to 18 and often at least 25 monomer units, inclusive of nucleotides and amino acid residues, in length. Because two polynucleotides may each comprise (1) a sequence (i.e., only a portion of the complete polynucleotide sequence) that is similar between the two polynucleotides, and (2) a sequence that is divergent between the two polynucleotides, sequence comparisons between two (or more) polynucleotides are typically performed by comparing sequences of the two polynucleotides over a “comparison window” to identify and compare local regions of sequence similarity. A “comparison window” refers to a conceptual segment of at least 6 contiguous positions, usually about 50 to about 100, more usually about 100 to about 150 in which a sequence is compared to a reference sequence of the same number of contiguous positions after the two sequences are optimally aligned. The comparison window may comprise additions or deletions (i.e., gaps) of about 20% or less as compared to the reference sequence (which does not comprise additions or deletions) for optimal alignment of the two sequences. Optimal alignment of sequences for aligning a comparison window may be conducted by computerized implementations of algorithms (GAP, BESTFIT, FASTA, and TFASTA in the Wisconsin Genetics Software Package Release 7.0, Genetics Computer Group, 575 Science Drive Madison, Wis., USA) or by inspection and the best alignment (i.e., resulting in the highest percentage homology over the comparison window) generated by any of the various methods selected. Reference also may be made to the BLAST family of programs as for example disclosed by Altschul et al., 1997, Nucl. Acids Res. 25:3389. A detailed discussion of sequence analysis can be found in Unit 19.3 of Ausubel et al., “Current Protocols in Molecular Biology”, John Wiley & Sons Inc, 1994-1998, Chapter 15.

[0126] As used herein, the term “triglyceride” (triacylglycerol or neutral fat) refers to a fatty acid triester of glycerol. Triglycerides are typically non-polar and water-insoluble.

[0127] “Phosphoglycerides” (or glycerophospholipids) are major lipid components of biological membranes, and include, for example, any derivative of sn-glycero-3-phosphoric acid that contains at least one O-acyl, or O-alkyl or O-alk-1′-enyl residue attached to the glycerol moiety and a polar head made of a nitrogenous base, a glycerol, or an inositol unit. Phosphoglycerides can also be characterized as amphipathic lipids formed by esters of acylglycerols with phosphate and another hydroxylated compound.

[0128] By “statistically significant,” it is meant that the result was unlikely to have occurred by chance. Statistical significance can be determined by any method known in the art. Commonly used measures of significance include the p-value, which is the frequency or probability with which the observed event would occur, if the null hypothesis were true. If the obtained p-value is smaller than the significance level, then the null hypothesis is rejected. In simple cases, the significance level is defined at a p-value of 0.05 or less.

[0129] “Substantially” or “essentially” means nearly totally or completely, for instance, 95%, 96%, 97%, 98%, 99% or greater of some given quantity.

[0130] “Transformation” refers to the permanent, heritable alteration in a cell resulting from the uptake and incorporation of foreign DNA into the host-cell genome; also, the transfer of an exogenous gene from one organism into the genome of another organism.

[0131] By “vector” is meant a polynucleotide molecule, preferably a DNA molecule derived, for example, from a plasmid, bacteriophage, yeast or virus, into which a polynucleotide can be inserted or cloned. A vector preferably contains one or more unique restriction sites and can be capable of autonomous replication in a defined host cell including a target cell or tissue or a progenitor cell or tissue thereof, or be integrable with the genome of the defined host such that the cloned sequence is reproducible. Accordingly, the vector can be an autonomously replicating vector, i.e., a vector that exists as an extra-chromosomal entity, the replication of which is independent of chromosomal replication, e.g., a linear or closed circular plasmid, an extra-chromosomal element, a mini-chromosome, or an artificial chromosome. The vector can contain any means for assuring self-replication. Alternatively, the vector can be one which, when introduced into the host cell, is integrated into the genome and replicated together with the chromosome(s) into which it has been integrated. Such a vector may comprise specific sequences that allow recombination into a particular, desired site of the host chromosome. A vector system can comprise a single vector or plasmid, two or more vectors or plasmids, which together contain the total DNA to be introduced into the genome of the host cell, or a transposon. The choice of the vector will typically depend on the compatibility of the vector with the host cell into which the vector is to be introduced. In the present case, the vector is preferably one which is operably functional in a photosynthetic microorganism cell, such as a Cyanobacterial cell. The vector can include a reporter gene, such as a green fluorescent protein (GFP), which can be either fused in frame to one or more of the encoded polypeptides, or expressed separately. The vector can also include a selection marker such as an antibiotic resistance gene that can be used for selection of suitable transformants.

[0132] The term “wild-type” refers to a gene or gene product that has the characteristics of that gene or gene product when isolated from a naturally-occurring source. A wild-type gene or gene product (e.g., a polypeptide) is that which is most frequently observed in a population and is thus arbitrarily designed the “normal” or “wild-type” form of the gene.

### Continuous Production Systems

[0133] The present invention relates, in part, to the discovery that modified photosynthetic organisms having reduced glycogen accumulation, e.g., due to reduced expression of one or more genes involved in glycogen biosynthesis, are able to undergo and maintain photosynthesis and produce carbon-containing compounds even when grown under stress conditions that reduce their growth. Thus, such modified photosynthetic organisms may be utilized as a continuous production system for carbon-containing compounds. In certain embodiments, such products are secreted, whereas in other embodiments, they may accumulate intracellulary in the modified photosynthetic organism. Therefore, carbon-containing compounds may be harvested from either the media or the organisms, respectively.

[0134] As described herein, the present invention provides for a system for producing a carbon-containing compound, which comprises both a modified photosynthetic organism (e.g., microorganism) that accumulates a reduced amount of glycogen as compared to the wild-type photosynthetic microorganism and a culture system for culturing said modified photosynthetic microorganism under a stress condition, wherein said modified photosynthetic organism maintains photosynthetic activity and accumulates reduced biomass when grown under said stress condition as compared to when grown under non-stress conditions.

[0135] In a related embodiment, the present invention also includes a method for producing a carbon-containing compound other than glycogen, comprising culturing in a culture media a modified photosynthetic organism that accumulates a reduced amount of glycogen as compared to the wild-type photosynthetic organism under a stress condition, wherein said modified photosynthetic microorganism maintains photosynthetic activity and accumulates reduced biomass when grown under said stress condition as compared to when grown under non-stress conditions.

[0136] Modified photosynthetic organisms that accumulate a reduced amount of glycogen and may be used according to the present invention are described in further detail below.

[0137] While a variety of stress conditions, including those defined herein may be used, in particular embodiments, the stress condition is a reduced amount of an essential nutrient, such as, e.g., nitrogen, sulfur, phosphate or phosphorous. In particular embodiments, the level of the nutrient is less than or equal to 50%, less than or equal to 40%, less than or equal to 30%, less than or equal to 20%, less than or equal to 10%, less than or equal to 5%, or less than or equal to 1% of the amount of nutrient considered standard for growth of the particular microorganism.

[0138] In certain embodiments, the system provides or the method comprises culturing the modified photosynthetic organism under conditions that provide a stress condition at a level that uncouples photosynthesis from growth, but also maintains the culture at an optical density advantageous for the organism's use of sunlight in photosynthesis. In various embodiments, this end is achieved by continually providing the stress condition (e.g., reduced nutrient) over a duration of time and at a level sufficient to inhibit cell growth while permitting photosynthesis. For example, where the stress condition is a reduced level of a nutrient, a particular reduced level may be maintained for a period of time. In particular embodiments, the duration of time is: from 1 day to 1 year, from 1 day to 6 months, from 1 day to 1 month, or from 1 day to 1 week, or at least about or up to about 1, 2, 3, 4, 5, 7, 8, 9, 10, 11, 12, 13, or 14 days, weeks or months. In certain embodiments, the level of the stress condition, e.g., the amount of nutrient such as nitrogen, is maintained at a concentration that significantly reduces prevents growth of both the wild-type and the modified photosynthetic microorganism, while triggering photosystem degradation in the wild-type microorganism but not the modified microorganism. In particular embodiments, a system of the invention may thus provide for continuous or pulsed delivery of a nutrient to a culture of modified photosynthetic organisms used according to the present invention.

[0139] In these and related embodiments, the stress condition may be relieved or removed at one or more times (e.g., by providing one or more pulses of a reduced essential nutrient), at a frequency and in an amount sufficient to maintain the culture at an optical density optimal for the photosynthetic use of sunlight or which prevents growth of both the wild-type and the modified photosynthetic organism, while triggering photosystem degradation in the wild-type microorganism but not the modified microorganism. For instance, in certain aspects the stress condition can be relieved when the ratio of absorbance of the culture at 680/750 nm is (or falls to) about 10%-90% of the ratio of a corresponding culture (e.g., of the same or comparable modified photosynthetic microorganism) under non-stress conditions, including where the ratio is or falls to about 10%, 15%, 20%, 30%, 35%, 40%, 50%, 55%, 60%, 65%, 70%, 75%, 80%, 85%, 90%, 10%-20%, 20%-30%, 30%-40%, 40%-50%, 60%-70%, 80%-90%, 10%-30%, 20%-40%, 30%-50%, 40%-60%, 50%-70%, 60%-80%, 70%-90%, 10%-40%, 20%-50%, 30%-60%, 40%-70%, 50%-80%, 60%-90%, 10%-50%, 20%-60%, 30%-70%, 40%-80%, or 50%-90% of the ratio of a corresponding culture under non-stress conditions, where non-stress conditions optionally comprise nutrient replete conditions. Separately or in combination with such determinations, the stress condition can be relieved on a periodic basis, for instance, at about 1, 2, 3, 4, 5, 6, 7, 8, 9, 10, 11, 12, 13, 14, 15, 16, 17, 18, 19, 20, 21, 22, 23, 24, 25, 26, 27, 28 or more days following initiation of the stress condition.

[0140] In certain instances, relieving the stress condition increases photosynthetic activity of the modified photosynthetic microorganism and/or increases the ratio of absorbance of the culture. For example, in some aspects, relieving the stress condition (e.g., pulsing with an otherwise reduced essential nutrient) increases photosynthetic activity by at least about 5%, 10%, 15%, 20%, 30%, 35%, 40%, 50%, 55%, 60%, 65%, 70%, 75%, 80%, 85%, 90%, 100%, 200%, 300%, 400%, 500% or more relative to photosynthetic activity immediately prior to relief of said stress condition. Photosynthetic activity can be measured, for example, by CO₂ fixation and/or chlorophyll levels, as described herein. In many instances, the modified photosynthetic microorganism maintains the increased photosynthetic activity for a substantially longer time (e.g., about 1.1, 1.2, 1.3, 1.4, 1.5, 1.6 1.7, 1.8, 1.9, 2, 2.5, 3, 3.5, 4, 4.5, 5, 6, 7, 8, 9, 10, 15, 20, 30, 40, or 50 times longer) than a wild-type photosynthetic microorganism under the same or comparable culture conditions. In certain instances, for example, following relief of the stress condition and increased photosynthetic activity, the subsequent decrease in photosynthetic activity by the modified photosynthetic microorganism is substantially less (e.g., about 1.1, 1.2, 1.3, 1.4, 1.5, 1.6 1.7, 1.8, 1.9, 2, 2.5, 3, 3.5, 4, 4.5, 5, 6, 7, 8, 9, 10, 15, 20, 30, 40, or 50 times less) than the subsequent decrease in photosynthetic activity by a wild-type photosynthetic microorganism culture under the same or comparable culture conditions.

[0141] In some embodiments, following removal of or relief from the stress condition, the ratio of absorbance increases (e.g., temporarily increases) to greater than about 90%, 91%, 92%, 93%, 94%, 95%, 96%, 98%, 99%, 100%, 105%, 110% or more of the ratio of a corresponding culture (e.g., of the same or comparable modified photosynthetic microorganism) under non-stress conditions, where non-stress conditions optionally comprise nutrient replete conditions. In most instances, the modified photosynthetic microorganism culture maintains this increased ratio of absorbance for a substantially longer time (e.g., about 1.1, 1.2, 1.3, 1.4, 1.5, 1.6 1.7, 1.8, 1.9, 2, 2.5, 3, 3.5, 4, 4.5, 5, 6, 7, 8, 9, 10, 15, 20, 30, 40, or 50 times longer) than a wild-type photosynthetic microorganism culture under the same or comparable culture conditions.

[0142] In specific aspects, the stress condition comprises reduced level of an essential nutrient, and relieving the stress condition comprises adding (i.e., pulsing the culture with) the essential nutrient in an amount sufficient to increase photosynthetic activity of the modified photosynthetic microorganism and/or increase the ratio of absorbance of the culture. In particular embodiments, the essential nutrient is selected from at least one of nitrogen, sulfur, and phosphorous. In specific embodiments, the essentially nutrient is nitrogen, which can be added to the culture in the form of NaNO₃, NH₄Cl, (NH₄)₂SO₄, NH₄HCO₃, CH₄N₂O, KNO₃, or any combination thereof, optionally to achieve a final concentration ranging from about 0.02 mM to about 1 mM to about 10 mM to about 20 mM to about 30 mM or to about 40 mM.

[0143] In any of these embodiments, the methods can further comprise repeating the step of relieving the stress condition, for instance, periodically and/or when certain cell culture conditions are observed. In practice, such repetition can occur almost indefinitely, as desired. In certain aspects, the step of relieving the stress condition can be repeated about every 2, 3, 4, 5, 6, 7, 8, 9, 10, 11, 12, 13, 14, 15, 16, 17, 18, 19, 20, 21, 22, 23, 24, 25, 26, 27, or 28 days following previous relief of the stress condition. Alternatively or in combination with periodic relief of the stress condition, the stress condition can be relieved any time the ratio of absorbance of the culture is or falls to about 10%-90% of the ratio of a corresponding culture under non-stress conditions, including any time the ratio is or falls to about 10%, 15%, 20%, 30%, 35%, 40%, 50%, 55%, 60%, 65%, 70%, 75%, 80%, 85%, 90%, 10%-20%, 20%-30%, 30%-40%, 40%-50%, 60%-70%, 80%-90%, 10%-30%, 20%-40%, 30%-50%, 40%-60%, 50%-70%, 60%-80%, 70%-90%, 10%-40%, 20%-50%, 30%-60%, 40%-70%, 50%-80%, 60%-90%, 10%-50%, 20%-60%, 30%-70%, 40%-80%, or 50%-90% of the ratio of a corresponding culture under non-stress conditions. Periodic or occasional relief of the stress condition, for instance, by pulsing with an otherwise reduced essential nutrient, can prolong the window during which the modified photosynthetic microorganisms described herein (e.g., reduced glycogen mutants) are able to maintain the optimal combination of photosynthetic activity and reduced cell growth/biomass accumulation. Because such modified photosynthetic microorganisms have a much larger window than wild-type for this optimal combination (see FIG. 11), it is not only easier to prolong this window (e.g., indefinitely) in such microorganisms, but also less expensive because of the reduced need for otherwise costly nutrients.

[0144] In certain embodiments, the culture is maintained at an optical cell density ranging from 0.25-2.0, 0.5-1.5, or about 1.0, i.e., within 10% of 1.0. In certain embodiments, this optical density is maintained for at least 50%, at least 75%, or at least 90% of the duration of the time that the culture is maintained under stress conditions. In one embodiment, the optimal photosynthetic rate is the rate of carbon fixation and reductant (e.g., NADPH) generation that maximizes production of the carbon-containing compound without loss of photosynthetic capacity over a defined time period, which may be, e.g., 1 day, 2 days, 1 week, 2 weeks or 1 month, 2 months, or 3 months.

[0145] In certain embodiments, the modified photosynthetic organism intracellularly accumulates and/or secretes an increased amount of a carbon-containing compound, such as a specialty chemical or a precursor or intermediate thereof, under said stress condition as compared to the wild-type microorganism. In specific embodiments, the amount of one or more of such carbon-containing compounds produced or secreted by the modified photosynthetic microorganism when grown at about 50-100 uE of light is at least about 10%, at least 15%, at least about 20%, at least about 25%, or at least about 30% of its dry weight per day.

[0146] In a specific embodiment, the present invention includes a production system or method for maintaining photosynthesis while reducing growth by reducing intracellular levels of 2-oxoglutarate in a photosynthetic organism.

[0147] In yet another embodiment, the present invention includes a method for increasing the secretion of glucose by a modified photosynthetic organism, which includes introducing or expressing (e.g., overexpressing) a polynucleotide encoding a polypeptide associated with glucose permeability, optionally under the control of an inducible promoter, in a modified photosynthetic organism having reduced glycogen accumulations, including any of those described herein, and then growing the modified photosynthetic microorganism under stress conditions. Without wishing to be bound by theory, it is understood that internal glucose levels are increased under stress, e.g., nitrogen stress, in the glycogen mutant, as compared to the wild-type under the same condition, so the glucose secretion triggered by expression of the polypeptide associated with glucose permeability renders glucose a carbon and reductant sink. Examples of various polypeptides associated with glucose permeability include, but are not limited to the glucose permease and glucose/H+ symporters described herein.

[0148] In particular embodiments of the various systems and methods of the present invention, the modified photosynthetic microorganism having reduced glycogen accumulation “maintains photosynthetic activity” under stress conditions of at least 20%, at least 30%, at least 40%, at least 50%, at least 60%, at least 70%, at least 80%, or at least 90% of its photosynthetic activity under non-stress conditions. In some aspects, the modified photosynthetic microorganism having reduced glycogen accumulation “maintains photosynthetic activity” under stress conditions by having photosynthetic activity that is substantially greater (e.g., by a statistically significant amount, such as about 1.5, 2, 3, 4, 5, 6, 7, 8, 9, 10, 15, 20, 25, 30, 40, 50, 60, 70, 80, 90, or 100-fold or more greater) than the photosynthetic activity of a corresponding wild-type photosynthetic microorganism under the same or comparable stress condition. In particular embodiments, said photosynthetic activity (i.e., for comparison) is measured at about day 1, 2, 3, 4, 5, 6, 7, 8, 9, 10, 11, 12, 13, 14, 15, 16, 17, 18, 19, 20, or 21 post-initiation or re-initiation of the stress condition, or anytime within about days 5-20 post-initiation or re-initiation of the stress condition.

[0149] In certain embodiments, maintenance of photosynthetic activity comprises maintenance of CO₂ fixation and/or maintenance of chlorophyll A levels. For instance, in particular embodiments, maintenance of photosynthetic activity includes where chlorophyll A levels of a modified photosynthetic microorganism under stress conditions are at least about 20%, 25%, 30%, 35%, 40%, 45%, 50%, 55%, 60%, 65%, 70%, 75%, 80%, 85%, 90%, 95%, 100%, 120%, 140%, 150%, 160%, 180%, 200% or more of chlorophyll A levels of the modified photosynthetic microorganism under non-stress conditions, such as nitrogen-replete conditions. In some aspects, maintenance of photosynthetic activity includes where chlorophyll A levels of a modified photosynthetic microorganism under stress conditions are substantially greater (e.g., by a statistically significant amount, such as about 1.5, 2, 3, 4, 5, 6, 7, 8, 9, 10, 15, 20, 25, 30, 40, 50, 60, 70, 80, 90, or 100-fold or more greater) than chlorophyll A levels of a corresponding wild-type photosynthetic microorganism under the same or comparable stress condition. In particular embodiments, said chlorophyll A levels (i.e., for comparison) are measured at about day 1, 2, 3, 4, 5, 6, 7, 8, 9, 10, 11, 12, 13, 14, 15, 16, 17, 18, 19, 20, or 21 post-initiation or re-initiation of the stress condition, or anytime within about days 5-20 post-initiation or re-initiation of the stress condition.

[0150] In particular embodiments of the various systems and methods of the present invention, the modified photosynthetic organism having reduced glycogen accumulation grows under stress conditions at a rate of less than 60%, less than 50%, less than 40%, less than 30% or less than 20% of its growth rate under non-stress conditions. Accordingly, in particular embodiments, systems and methods of the present invention comprise splitting or reducing the density of cultures less frequently than for a corresponding wild-type or unmodified organism. In particular embodiments, culture are grown for at least 2 days, at least 1 week, at least 2 weeks, at least 1 month, at least 2 months, at least 4 months, at least 6 months, or at least 1 year without being split, diluted or their density reduced by more than 10%.

[0151] As described herein, in certain embodiments, systems and methods of the present invention utilize modified photosynthetic organisms that include modifications in addition to those resulting in reduced glycogen, such as modifications to further increase production of a carbon-containing compound described herein. Merely by way of example, certain aspects include modifications to further increase lipid production or secretion (e.g., increase production of fatty acids, fatty alcohols, alkanes), to allow the production of triglycerides and/or wax esters, to facilitate the production of isobutanol or isopentanol, to facilitate the production of 4-hydroxybutyrate and/or 1,4-butanediol, and/or to increase production of polyamine intermediates.

### Modified Photosynthetic Microorganisms

[0152] The present invention relates, in part, to the discovery that reducing the expression level of certain genes involved in glycogen synthesis, such as by mutation or deletion, leads to reduced glycogen synthesis and/or storage in modified photosynthetic microorganisms, such as Cyanobacteria, and further uncouples photosynthesis from growth under stress conditions. For instance, Cyanobacteria, such as Synechococcus, which contain deletions of the glucose-1-phosphate adenylyltransferase gene (glgC), the phosphoglucomutase gene (pgm), and/or the glycogen synthase gene (glgA), individually or in various combinations, may produce and accumulate significantly reduced levels of glycogen as compared to wild-type Cyanobacteria. The reduction of glycogen synthesis or accumulation may be especially pronounced under stress conditions, including the reduction of nitrogen. In addition, the present invention further relates to the discovery that the overexpression in photosynthetic microorganisms, including Cyanobacteria, of genes or proteins involved in glycogen breakdown or secretion also leads to reduced glycogen synthesis and/or storage.

[0153] Accordingly, the present invention further relates to the discovery that by blocking, disrupting, or down-regulating the natural glycogen synthesis and storage pathway, e.g., by gene mutation or deletion, or by increasing, enhancing, or up-regulating the natural glycogen breakdown pathway in modified photosynthetic organisms, including photosynthetic microorganisms such as Cyanobacteria, the resulting strains of photosynthetic organisms increase carbon flow into other biosynthetic pathways. Examples of other biosynthetic pathways include existing pathways, such as existing lipid biosynthetic pathways, or pathways that are introduced through genetic engineering, such as triglyceride or other carbon-containing compound biosynthesis pathways.

[0154] The present invention, therefore, relates generally to modified photosynthetic organisms, including modified Cyanobacteria, and methods of use thereof, which have been modified to produce or store reduced levels of glycogen as compared to wild-type photosynthetic microorganisms. In particular embodiments, the modified photosynthetic organism is genetically modified, for instance, relative to the wild-type or most frequently observed photosynthetic organism of that same species. Genetic modifications can be man-made and/or naturally-occurring, for instance, by direct molecular biological intervention (e.g., cloning or insertion of exogenous genetic elements to reduce expression of genes associated with glycogen synthesis/storage), directed evolution under controlled conditions to enhance natural selection of glycogen-deficient or glycogen-reduced mutants, or identification of spontaneous glycogen-deficient or glycogen-reduced mutants under natural conditions, including combinations thereof.

[0155] In certain embodiments, the modified photosynthetic organism has a reduced level of expression of one or more genes of a glycogen biosynthesis or storage pathway and/or overexpresses one or more genes or proteins of a glycogen breakdown pathway, such that said photosynthetic organism synthesizes or accumulates a reduced amount of glycogen, e.g., under stress conditions, e.g., reduced nitrogen, as compared to a wild-type photosynthetic organism. In one embodiment, the modified photosynthetic organism comprises one or more mutations or deletions in one or more genes of a glycogen biosynthesis or storage pathway, which may be, e.g., complete or partial gene deletions. In other embodiments, the modified photosynthetic organism comprises one or more polynucleotides comprising an antisense RNA sequence that targets, e.g., hybridizes to, one or more genes or mRNAs of a glycogen biosynthesis or storage pathway, such as an antisense oligonucleotide or a short interfering RNA (siRNA), or a vector that expresses one or more such polynucleotides.

[0156] In particular embodiments, the modified photosynthetic microorganism comprises one or more introduced or overexpressed polynucleotides that encode one or more proteins associated with glycogen breakdown or secretion of glycogen precursors. For instance, modified photosynthetic microorganisms that accumulate reduced glycogen relative to wild-type may comprise one or more introduced or overexpressed polynucleotides that encode one or more of a glycogen phosphorylase (GlgP), glycogen isoamylase (GlgX), glucanotransferase (MalQ), phosphoglucomutase (Pgm), glucokinase (Glk), and/or a phosphoglucose isomerase (Pgi), include functional fragments and variants thereof. Pgm, Glk, and Pgi are bidirectional enzymes that can promote glycogen synthesis or breakdown depending on conditions.

[0157] In particular embodiments, the modified photosynthetic organism produces an increased amount of one or more carbon-containing compounds other than glycogen. Exemplary carbon-containing compounds are described herein.

[0158] In certain aspects, the modified photosynthetic organisms described herein are further modified to increase production of lipids, for instance, by introducing and/or overexpressing one or more polypeptides associated with lipid biosynthesis. Examples of such lipids include fatty acids, fatty alcohols, fatty aldehydes, alkane/alkenes, triglycerides, and wax esters. Hence, in some instances, modified photosynthetic microorganisms that accumulate a reduced amount of glycogen as compared to the wild-type photosynthetic microorganism can further comprise one or more introduced or overexpressed polynucleotides encoding one or more of an acyl carrier protein (ACP), acyl ACP synthase (Aas), acyl-ACP reductase, alcohol dehydrogenase, aldehyde dehydrogenase, aldehyde decarbonylase, thioesterase (TES), acetyl coenzyme A carboxylase (ACCase), diacylglycerol acyltransferase (DGAT), phosphatidic acid phosphatase (PAP; or phosphatidate phosphatase), triacylglycerol (TAG) hydrolase, fatty acyl-CoA synthetase, lipase/phospholipase, or any combination thereof.

[0159] Moreover, by further modifying a given photosynthetic organism of the present invention having a disrupted/reduced glycogen biosynthesis or storage pathway and/or an enhanced glycogen breakdown pathway, so as to increase the production of other carbon-containing compounds, such as lipids, which are necessary for the production of triglycerides, and by also modifying that photosynthetic microorganism to produce triglycerides, certain of the modified photosynthetic microorganism of the present invention can be used to produce higher amounts of triglycerides than would otherwise be possible absent the discovery that disruption of glycogen pathways in photosynthetic microorganism could be utilized to increase the production of other carbon-containing compounds under stress conditions. Certain embodiments thus include modified photosynthetic microorganisms that accumulate a reduced amount of glycogen as compared to the wild-type photosynthetic microorganism, and which comprise one or more introduced polynucleotides that encode an enzyme having DGAT activity. Optionally, to further increase production of triglycerides, such photosyntheticm microorganisms can further comprise one or more introduced or overexpressed polynucleotides that encode a phosphatidate phosphatase, ACCase, ACP, phospholipase B, phospholipase C, fatty acyl Co-A synthetase, or any combination thereof. Specific embodiments include an introduced DGAT in combination with an introduced or overexpressed ACCase, PAP, or both.

[0160] Certain embodiments of the present invention relate to modified photosynthetic organisms, including Cyanobacteria, and methods of use thereof, wherein the modified photosynthetic microorganisms further comprise one or more over-expressed, exogenous, or introduced polynucleotides encoding an acyl-ACP reductase polypeptide, or a fragment or variant thereof. In particular embodiments, the fragment or variant thereof retains at least 50% of one or more activities of the wild-type acyl-ACP reductase polypeptide. As with most any of the overexpressed polypeptides described herein, an overexpressed acyl-ACP reductase can be encoded by an endogenous or naturally-occurring polynucleotide which is operably linked to an introduced promoter, typically upstream of the microorganism's natural acyl-ACP reductase coding region, and/or it can be encoded by an introduced polynucleotide that encodes an acyl-ACP reductase.

[0161] In certain embodiments, an introduced promoter is inducible, and in some embodiments it is constitutive. Included are weak promoters under non-induced conditions. Exemplary promoters are described elsewhere herein and known in the art. In particular embodiments, the introduced promoter is exogenous or foreign to the photosynthetic microorganism, i.e., it is derived from a genus/species that differs from the microorganism being modified. In other embodiments, the introduced promoter is a recombinantly introduced copy of an otherwise endogenous or naturally-occurring promoter sequence, i.e., it is derived from the same species of microorganism being modified.

[0162] Similar principles can apply to the introduced polynucleotide which encodes the acyl-ACP reductase or other overexpressed polypeptide (e.g., aldehyde dehydrogenase). For instance, in particular embodiments, the introduced polynucleotide encoding the acyl-ACP reductase or other polypeptide is exogenous or foreign to the photosynthetic microorganism, i.e., it is derived from a genus/species that differs from the microorganism being modified. In other embodiments, the introduced polynucleotide is a recombinantly introduced copy of an otherwise endogenous or naturally-occurring sequence, i.e., it is derived from the same species of microorganism being modified.

[0163] Acyl-ACP reductase polypeptides, and fragments and variants thereof, that may be used according to the compositions and methods of the present invention are described herein. The present invention contemplates the use of naturally-occurring and non-naturally-occurring variants of these acyl-ACP reductase and other lipid biosynthesis proteins (e.g., ACP, ACCase, DGAT, acyl-CoA synthetase, aldehyde dehydrogenase), as well as variants of their encoding polynucleotides. These enzyme encoding sequences may be derived from any microorganism (e.g., plants, bacteria) having a suitable sequence, and may also include any man-made variants thereof, such as any optimized coding sequences (i.e., codon-optimized polynucleotides) or optimized polypeptide sequences.

[0164] Acyl-ACP reductase polypeptides may also be overexpressed in strains of photosynthetic microorganisms that have been modified to overexpress one or more selected lipid biosynthesis proteins (e.g., selected fatty acid biosynthesis proteins, triacylglycerol biosynthesis proteins, alkane/alkene biosynthesis proteins, wax ester biosynthesis proteins).

[0165] For example, to produce triglycerides, a modified photosynthetic microorganism may comprise an overexpressed acyl-ACP reductase in combination with an introduced polynucleotide that encodes a DGAT. In these and related embodiments, triglyceride production can be further increased by introduction or overexpression of an aldehyde dehydrogenase, for instance, to increase production of fatty acids, the precursors to triglycerides. One exemplary aldehyde dehydrogenase is encoded by orf0489 of Synechococcus elongatus PCC7942. Also included are homologs or paralogs thereof, functional equivalents thereof, and fragments or variants thereofs. Functional equivalents can include aldehyde dehydrogenases with the ability to convert acyl aldehydes (e.g., nonyl-aldehyde) into fatty acids. In specific embodiments, the aldehyde dehydrogenase has the amino acid sequence of SEQ ID NO:103 (encoded by the polynucleotide sequence of SEQ ID NO:102), or an active fragment or variant of this sequence. These and related embodiments can be further combined with reduced expression and/or activity of an endogenous aldehyde decarbonylase (e.g., orf1593 in S. elongatus), described herein, to shunt carbon away from alkanes and towards fatty acids, the precursors to triglycerides.

[0166] To produce wax esters, a modified photosynthetic microorganism may comprise an overexpressed acyl-ACP reductase and an introduced polynucleotide that encodes a DGAT (e.g., a bi-functional DGAT having wax ester synthase activity) in further combination with an introduced or overexpressed polynucleotide that encodes an alcohol dehydrogenase, such as a long-chain alcohol dehydrogenase. Exemplary alcohol dehydrogenases include slr1192 from Synechycystis sp. PC06083 and ACIAD3612 from Acinetobacter baylyi (see SEQ ID NOS:104-107). Also included are homologs or paralogs thereof, functional equivalents thereof, and fragments or variants thereofs. Functional equivalents can include alcohol dehydrogenases with the ability to convert acyl aldehydes (e.g., nonyl-aldehyde, O₁₂, O₁₄, O₁₆, O₁₈, O₂₀ fatty aldehydes) into fatty alcohols, which can then be converted into wax esters by the wax ester synthase. In specific embodiments, the alcohol dehydrogenase has the amino acid sequence of SEQ ID NO:105 (slr1192; encoded by the polynucleotide sequence of SEQ ID NO:104), or an active fragment or variant of this sequence. In some embodiments, the alcohol dehydrogenase has the amino acid sequence of SEQ ID NO:107 (ACIAD3612; encoded by the polynucleotide sequence of SEQ ID NO:106), or an active fragment or variant of this sequence. Certain of these and related embodiment can be combined with any one or more of reduced expression and/or activity of an endogenous aldehyde dehydrogenase (e.g., orf0489 deletion) to shunt carbon away from fatty acid production, reduced expression and/or activity of an endogenous aldehyde decarbonylase (e.g., orf1593 deletion) to shunt carbon away from alkane production, or both. Also included are combinations that further comprise an introduced or overexpressed acyl carrier protein (ACP), optionally in combination with an introduced or overexpressed acyl-ACP synthetase (Aas).

[0167] To produce fatty alcohols, a modified photosynthetic microorganism may comprise an overexpressed acyl-ACP reductase in combination with an introduced or overexpressed alcohol dehydrogenase. These and related embodiments can be further combined with reduced expression and/or activity of an endogenous aldehyde decarbonylase (e.g., orf1593 from S. elongatus), reduced expression and/or activity of an endogenous aldehyde dehydrogenase (e.g., orf0489 from S. elongatus), or both, to respectively shunt carbon away from alkanes/alkenes and fatty acids and towards fatty alcohols.

[0168] To produce alkanes and/or alkenes, a modified photosynthetic microorganism may comprise an overexpressed acyl-ACP reductase in combination with an introduced or overexpressed aldehyde decarbonylase. Exemplary aldehyde decarbonylases include that encoded by orf1593 of S. elongatus PCC7942 and its orthologs/paralogs, including those found in Synechocystis sp. PCC6803 (encoded by orfsll0208), N. punctiforme PCC 73102, Thermosynechococcus elongatus BP-1, Synechococcus sp. Ja-3-3AB, P. marinus MIT9313, P. marinus NATL2A, and Synechococcus sp. RS 9117, the latter having at least two paralogs (RS 9117-1 and -2). These and related embodiments can be further combined with reduced expression and/or activity of an endogenous aldehyde dehydrogenase (e.g., orf0489 from S. elongatus), reduced expression and/or activity of an endogenous alcohol dehydrogenase (e.g., a long-chain alcohol dehydrogenase), or both, to respectively shunt carbon away from fatty acids and fatty alcohols and towards alkanes and/or alkenes.

[0169] To produce fatty acids, such as free fatty acids, a modified photosynthetic microorganism may comprise an overexpressed acyl-ACP reductase in optional combination with an introduced or overexpressed aldehyde dehydrogenase (e.g., orf 0489 from S. elongatus or orthologs/paralogs/homologs thereof). These and related embodiments can be further combined with reduced expression and/or activity of an aldehyde decarbonylase (e.g., orf1593 from S. elongatus), reduced expression and/or activity of an endogenous alcohol dehydrogenase (e.g., long-chain alcohol dehydrogenase), or both, to respectively shunt carbon away from alkanes and fatty alcohols and towards fatty acids. In certain embodiments, such as Cyanobacteria including S. elongatus PCC7942, orf1593 resides directly upstream of orf1594 (acyl-ACP reductase coding region) and encodes an aldehyde decarbonylase. According to one non-limiting theory, because the aldehyde decarbonylase encoded by orf1593 utilizes acyl aldehyde as a substrate for alkane production, reducing expression of this protein may further increase yields of free fatty acids by shunting acyl aldehydes (e.g., produced by acyl-ACP reductase) away from an alkane-producing pathway, and towards a fatty acid- or fatty alcohol-producing and storage pathway. PCC7942_orf1593 orthologs can be found, for example, in Synechocystis sp. PCC6803 (encoded by orfsll0208), N. punctiforme PCC 73102, Thermosynechococcus elongatus BP-1, Synechococcus sp. Ja-3-3AB, P. marinus MIT9313, P. marinus NATL2A, and Synechococcus sp. RS 9117, the latter having at least two paralogs (RS 9117-1 and -2). Included are strains having mutations or full or partial deletions of one or more genes encoding these and other aldehyde decarbonylases, such as S. elongatus PCC7942 having a full or partial deletion of orf1593, and Synechocystis sp. PCC6803 having a full or partial deletion of orfsll0208). For instance, an exemplary modified photosynthetic microorganism could comprise an overexpressed acyl-ACP reductase, combined with a full or partial deletion of the glgC gene, the glgA gene, and/or the pgm gene, optionally combined with an overexpressed aldehyde dehydrogenase, and optionally combined with a full or partial deletion of a gene encoding an aldehyde decarbonylase (e.g., PCC7942_orf1593, PCC6803_orfsll0208).

[0170] Other combinations include, for example, a modified photosynthetic microorganism comprising reduced glycogen accumulation, in combination with one more of an overexpressed ACP; an overexpressed acyl-ACP reductase in combination with an overexpressed ACP; an acyl-ACP reductase on combination with an ACCase; an acyl-ACP reductase on combination with an ACP and an ACCase; an overexpressed acyl-ACP reductase in combination with an overexpressed DGAT and optionally an overexpressed acyl-CoA synthetase (e.g., a DGAT/acyl-CoA synthetase combination); an overexpressed acyl-ACP reductase with an overexpressed ACP and an overexpressed DGAT, optionally combined with an overexpressed acyl-CoA synthetase; an overexpressed acyl-ACP reductase with an overexpressed ACCase and an overexpressed DGAT, optionally in combination with an overexpressed acyl-CoA synthetase; and an overexpressed acyl-ACP reductase with an overexpressed ACP, ACCase, and an overexpressed DGAT, optionally in combination with an overexpressed acyl-CoA synthetase. Acyl-ACP reductase and DGAT-overexpressing strains, optionally in combination with an overexpressed acyl-CoA synthetase, typically produce increased triglycerides relative to DGAT-only overexpressing strains.

[0171] Any one of these embodiments can also be combined with a strain having reduced expression of an acyl-ACP synthetase (Aas). Without wishing to be bound by any one theory, an endogenous aldehyde dehydrogenase is acting on the acyl-aldehydes generated by orf1594 and converting them to free fatty acids. The normal role of such a dehydrogenase might involve removing or otherwise dealing with damaged lipids. In this scenario, it is then likely that the Aas gene product recycles these free fatty acids by ligating them to ACP. Accordingly, reducing or eliminating expression of the Aas gene product might ultimately increase production of fatty acids and thus optionally triglycerides (e.g., in a DGAT-expressing microorganism), by reducing or preventing their transfer to ACP. Included are mutations and full or partial deletions of one or more Aas genes, such as the Aas gene of Synechococcus elongatus PCC 7942. As one example, a specific modified photosynthetic microorganism could comprise an overexpressed acyl-ACP reductase, combined with a full or partial deletion of the glgC gene, the glgA gene, and/or the pgm gene, optionally combined with an overexpressed ACP, ACCase, DGAT/acyl-CoA synthetase, or all of the foregoing, optionally combined with a full or partial deletion of a gene encoding an aldehyde decarbonylase (e.g., PCC7942_orf1593, PCC6803_orfsll0208), and optionally combined with a full or partial deletion of an Aas gene encoding an acyl-ACP synthetase.

[0172] Certain embodiments of the systems and methods of the present invention utilize modified photosynthetic organisms with reduced glycogen accumulation that are further modified to allow production of isobutanol or isopentanol. In particular embodiments, these organisms comprise one or more introduced or overexpressed polynucleotides that encode a polypeptide associated with isobutanol or isopentanol production. Examples of such polynucleotides include the genes required to convert a 2-keto acid to an aldehyde (2-keto acid decarboxylase) and then convert the aldehyde to an alcohol (alcohol dehydrogenase) in Synechococcus elongatus, according to Atsumi and Liao 2007 Nature and 2009 Nature Biotech. Expression of these genes, or functional fragments or variants thereof, should allow for the production of isobutanol or isopentanol (3-methyl-1-butanol). In specific embodiments, these genes are Alpha-ketoisovalerate decarboxylase (2-keto acid decarboxylase) from Lactococcus lactis (kivd) and Alcohol dehydrogenase from E. coli (YqhD). The polynucleotide sequence of Alpha-ketoisovalerate decarboxylase (2-keto acid decarboxylase) from Lactococcus lactis is set forth in SEQ ID NO:180, and its encoded polypeptide sequence is set forth in SEQ ID NO:181. The polynucleotide sequence of alcohol dehydrogenase from E. coli (YqhD) is set forth in SEQ ID NO:182, and its encoded polypeptide sequence is set forth in SEQ ID NO:183.

[0173] In additional related embodiments, the modified photosynthetic organism with reduced glycogen accumulation are further modified to include one or more introduced or overexpressed polynucleotides involved in converting pyruvate to the precursors for isobutanol or isopentanol production. Thus, they may also be used in combination with any of the related modifications described above. Examples of such polynucleotides and encoded polypeptides include, acetolactate synthase (e.g., Synechococcus elongatus PCC7942 ilvN (NCBI YP_{—}401451; SEQ ID NO:184)), acetolactate synthase (e.g., Synechococcus elongatus PCC7942 ilvB (NCBI YP_{—}399158; SEQ ID NO:185)), ketol-acid reductoisomerase (e.g., Synechococcus elongatus PCC7942 ilvC (NCBI YP_{—}400569; SEQ ID NO:186), dihydroxy-acid dehydratase (e.g., Synechococcus elongatus PCC7942 ilvD (NCBI YP_{—}399645; SEQ ID NO:187)), 2-isopropylmalate synthase (e.g., Synechococcus elongatus PCC7942 leuA1 (NCBI YP_{—}399447; SEQ ID NO: 188)); 2-isopropylmalate synthase (e.g., Synechococcus elongatus PCC7942 leuA2 (NCBI YP_{—}400427; SEQ ID NO: 189)), isopropylmalate dehydratase (e.g., Synechococcus elongatus PCC7942 leuD (NCBIYP_{—}401565; SEQ ID NO:190)), isopropylmalate dehydratase (e.g., Synechococcus elongatus PCC7942 leuC (NCBI YP_{—}400915; SEQ ID NO:191)), 3-isopropylmalate dehydrogenase (e.g., Synechococcus elongatus PCC7942 leuB (NCBI YP_{—}400522; SEQ ID NO:192); acetolactate synthase (e.g., Bacillus subtilus 168 alsS (NCBI NP_{—}391482; SEQ ID NO:193)); ketol-acid reductoisomerase, NAD(P)-binding (e.g., E. coli K-12, MG1655 ilvC (NCBI NP_{—}418222; SEQ ID NO:194)); and dihydroxyacid dehydratase (e.g., E. coli K-12, MG1655 ilvD (NCBI_YP_{—}026248; SEQ ID NO:195)) and functional fragments and variants thereof.

[0174] In additional embodiments, the modified photosynthetic organism with reduced glycogen accumulation are further modified to include one or more introduced or overexpressed polynucleotides involved in glucose secretion, in order to allow for continued secretion of glucose from glycogen deficient strains that are placed under stress conditions. Examples of such polynucleotides and encoded polypeptides are glucose permeases and glucose/H+ symporters, such as glcP (e.g., Bacillus subtilis168 glcP; NCBI NP_{—}388933; SEQ ID NO:176), glcP1 (e.g., Streptomyces coelicolor glcP1; NCBI NP_{—}629713.1; SEQ ID NO:177), glcP2 (e.g., Streptomyces coelicolor A3 glcP2; NCBI NP_{—}631212; SEQ ID NO:178), and Mycobacterium smegmatis MC2 155 (NCBI YP_{—}888461; SEQ ID NO:179), and functional fragments and variants thereof.

[0175] Certain embodiments of the systems and methods of the present invention utilize modified photosynthetic organisms with reduced glycogen accumulation that are further modified to allow production of 4-hydroxybutyrate. In particular embodiments, these photosynthetic organisms comprise one or more introduced or overexpressed polynucleotides that encode a polypeptide associated with 4-hydroxybutyrate production. Examples of such polynucleotides include the genes required to convert 2-oxogluturate into succinate semialdehyde, and then convert the latter into 4-hydroxybutyrate. In particular embodiments, an alpha-ketoglutarate decarboxylase converts 2-oxogluturate into succinate semialdehyde and a 4-hydroxybutyrate dehydrogenase converts succinate semialdehyde into 4-hydroxybutyrate. Additional examples of such polynucleotides include the genes required to convert succinate into succinyl-CoA, convert succinyl-CoA into succinate semialdehyde, and then conver the latter into 4-hydroxybutyrate. In particular embodiments, a succinyl-CoA synthetase converts succinate into succinyl-CoA, a succinate-semialdehyde dehydrogenase converts succinyl-CoA into succinate semialdehyde, and a 4-hydroxybutyrate dehydrogenase converts succinate semialdehyde into 4-hydroxybutyrate. Specific examples of alpha-ketoglutarate decarboxylases include those encoded by CCDC5180_{—}0513 (SEQ ID NO:199) from Mycobacterium bovis and SYNPCC7002_A2770 (SEQ ID NO:201) from Synechococcus sp PCC 7002. Specific examples of 4-hydroxybutyrate dehydrogenases include those encoded by PGN_{—}0724 (SEQ ID NO:203) from Porphyromonas gingivalis and CKR_{—}2662 (SEQ ID NO:205) from Clostridium kluyveri. Specific examples of succinyl-CoA synthetases include the succinyl-CoA synthetase-alpha subunit encoded by sucC (b0728) (SEQ ID NO:213) from E. coli and the succinyl-CoA synthetase-beta subunit encoded by sucD (b0729) (SEQ ID NO:215) from E. coli. Specific examples of succinate-semialdehyde dehydrogenases include that encoded by PGTDC60_{—}1813 (SEQ ID NO:217) from Porphyromonas gingivalis. Expression of certain combinations of these or related genes, or functional fragments or variants thereof, should allow for the production of 4-hydroxybutyrate from 2-oxogluturate or succinate (see FIG. 22).

[0176] Certain embodiments of the systems and methods of the present invention utilize modified photosynthetic organisms with reduced glycogen accumulation that are further modified to allow production of 4-hydroxybutyrate and optionally 1,4-butanediol. In some embodiments, and further to the polypeptides associated with the production of 4-hydroxybutyrate (supra), these microorganisms comprise one or more introduced or overexpressed polynucleotides that encode a polypeptide associated with the production of 1,4-butanediol from 4-hydroxybutyrate. Examples of such polynucleotides include the genes required to convert 4-hydroxybutyrate into 4-hydroxybutyryl-CoA, then convert 4-hydroxybutyryl-CoA into 4-hydroxybutyraldehyde, and then convert 4-hydroxybutyraldehyde into 1,4-butanediol. In particular embodiments, a 4-hydroxybutyryl-CoA transferase converts 4-hydroxybutyrate into 4-hydroxybutyryl-CoA, an aldehyde/alcohol dehydrogenase converts 4-hydroxybutyryl-CoA into 4-hydroxybutyraldehyde (e.g., one that is capable of reducing coA-linked substrates to aldehydes/alcohols), and an aldehyde/alcohol dehydrogenase converts 4-hydroxybutyraldehyde into 1,4-butanediol. Specific examples of 4-hydroxybutyryl-CoA transferases include that encoded by cat2 (CKR_{—}2666) (SEQ ID NO:207) from Clostridium kluyveri, including homologs from Clostridium aminobutyricum and Porphyromonas gingivalis. Specific examples of aldehyde/alcohol dehydrogenases include those encoded by adhE2 (CEA_P0034) (SEQ ID NO:209) from Clostridium acetobutylicum and adhE (b1241) (SEQ ID NO:211) from E. coli. Expression of certain combinations of these or related genes, or functional fragments or variants thereof, should allow for the production of 4-hydroxybutyrate from 2-oxogluturate or succinate, and the production of 1,4-butanediol from 4-hydroxybutyrate (see FIG. 22).

[0177] Particular embodiments of the systems and methods of the present invention utilize modified photosynthetic organisms with reduced glycogen accumulation that are further modified to allow production of polyamine intermediates/precursors. Exemplary polyamine intermediates include agmatine and putrescine. As shown in the accompanying Examples, the systems and methods described herein can produce increased agmatine and putrescine without any further modifications. However, in particular embodiments, to further increase production these microorganisms may comprise one or more introduced or overexpressed polynucleotides that encode a polypeptide associated with polyamine intermediate production. Examples of such polynucleotides include the genes required to convert L-arginine into agmatine, and optionally the genes required to convert agmatine into N-carbamoylputrescine, and then convert N-carbamoylputrescine into putrescine. In some embodiments, an arginine decarboxylase is introduced or overexpressed to convert L-arginine into agmatine. In particular embodiments, an agmatine deiminase is introduced or overexpressed to convert agmatine into N-carbamoylputrescine, and/or a N-carbamoylputrescine amidase is introduced or overexpressed to convert N-carbamoylputrescine into putrescine. Specific examples of arginine decarboxylases include that encoded by Synpcc7942_{—}1037 (SEQ ID NO:219) from S. elongatus PCC7942. Specific examples of agmatine deiminases include that encoded by Synpcc7942_{—}2402 (SEQ ID NO:221) and Synpcc7942_{—}2461 from S. elongatus PCC7942. Specific examples of N-carbamoylputrescine amidases include that encoded by Synpcc7942_{—}2145 (SEQ ID NO:223) from S. elongatus PCC7942. Introduction or overexpression of certain combinations of these or related genes, or functional fragments or variants thereof, should allow for the increased production of agmatine, putrescine, or both (see FIG. 23).

[0178] Increased expression can be achieved a variety of ways, for example, by introducing a polynucleotide into the photosynthetic organism, modifying an endogenous gene to overexpress the polypeptide, or both. For instance, one or more copies of an otherwise endogenous polynucleotide sequence can be introduced by recombinant techniques to increase expression, and/or a promoter/enhancer sequence can be introduced upstream of an endogenous gene to regulate expression.

[0179] Modified photosynthetic organisms of the present invention may be produced, for example, using any type of photosynthetic microorganism. These include, but are not limited to photosynthetic bacteria, green algae, and Cyanobacteria. The photosynthetic microorganism can be, for example, a naturally photosynthetic microorganism, such as a Cyanobacterium, or an engineered photosynthetic microorganism, such as an artificially photosynthetic bacterium.

[0180] Exemplary microorganisms that are either naturally photosynthetic or can be engineered to be photosynthetic include, but are not limited to, bacteria; fungi; archaea; protists; eukaryotes, such as a green algae; and animals such as plankton, planarian, and amoeba. Examples of naturally occurring photosynthetic microorganisms include, but are not limited to, Spirulina maximum, Spirulina platensis, Dunaliella salina, Botrycoccus braunii, Chlorella vulgaris, Chlorella pyrenoidosa, Serenastrum capricomutum, Scenedesmus auadricauda, Porphyridium cruentum, Scenedesmus acutus, Dunaliella sp., Scenedesmus obliquus, Anabaenopsis, Aulosira, Cylindrospermum, Synechococcus sp., Synechocystis sp., and/or Tolypothrix.

[0181] A modified Cyanobacteria of the present invention may be from any genera or species of Cyanobacteria that is genetically manipulable, i.e., permissible to the introduction and expression of exogenous genetic material. Examples of Cyanobacteria that can be engineered according to the methods of the present invention include, but are not limited to, the genus Synechocystis, Synechococcus, Thermosynechococcus, Nostoc, Prochlorococcu, Microcystis, Anabaena, Spirulina, and Gloeobacter.

[0182] Cyanobacteria, also known as blue-green algae, blue-green bacteria, or Cyanophyta, is a phylum of bacteria that obtain their energy through photosynthesis. Cyanobacteria can produce metabolites, such as carbohydrates, proteins, lipids and nucleic acids, from CO₂, water, inorganic salts and light. Any Cyanobacteria may be used according to the present invention.

[0183] Cyanobacteria include both unicellular and colonial species. Colonies may form filaments, sheets or even hollow balls. Some filamentous colonies show the ability to differentiate into several different cell types, such as vegetative cells, the normal, photosynthetic cells that are formed under favorable growing conditions; akinetes, the climate-resistant spores that may form when environmental conditions become harsh; and thick-walled heterocysts, which contain the enzyme nitrogenase, vital for nitrogen fixation.

[0184] Heterocysts may also form under the appropriate environmental conditions (e.g., anoxic) whenever nitrogen is necessary. Heterocyst-forming species are specialized for nitrogen fixation and are able to fix nitrogen gas, which cannot be used by plants, into ammonia (NH₃), nitrites (NO₂⁻), or nitrates (NO₃⁻), which can be absorbed by plants and converted to protein and nucleic acids.

[0185] Many Cyanobacteria also form motile filaments, called hormogonia, which travel away from the main biomass to bud and form new colonies elsewhere. The cells in a hormogonium are often thinner than in the vegetative state, and the cells on either end of the motile chain may be tapered. In order to break away from the parent colony, a hormogonium often must tear apart a weaker cell in a filament, called a necridium.

[0186] Each individual Cyanobacterial cell typically has a thick, gelatinous cell wall. Cyanobacteria differ from other gram-negative bacteria in that the quorum sensing molecules autoinducer-2 and acyl-homoserine lactones are absent. They lack flagella, but hormogonia and some unicellular species may move about by gliding along surfaces. In water columns, some Cyanobacteria float by forming gas vesicles, like in archaea.

[0187] Cyanobacteria have an elaborate and highly organized system of internal membranes that function in photosynthesis. Photosynthesis in Cyanobacteria generally uses water as an electron donor and produces oxygen as a by-product, though some Cyanobacteria may also use hydrogen sulfide, similar to other photosynthetic bacteria. Carbon dioxide is reduced to form carbohydrates via the Calvin cycle. In most forms, the photosynthetic machinery is embedded into folds of the cell membrane, called thylakoids. Due to their ability to fix nitrogen in aerobic conditions, Cyanobacteria are often found as symbionts with a number of other groups of microorganisms such as fungi (e.g., lichens), corals, pteridophytes (e.g., Azolla), and angiosperms (e.g., Gunnera), among others.

[0188] Cyanobacteria are the only group of microorganisms that are able to reduce nitrogen and carbon in aerobic conditions. The water-oxidizing photosynthesis is accomplished by coupling the activity of photosystem (PS) II and I (Z-scheme). In anaerobic conditions, Cyanobacteria are also able to use only PS I (i.e., cyclic photophosphorylation) with electron donors other than water (e.g., hydrogen sulfide, thiosulphate, or molecular hydrogen), similar to purple photosynthetic bacteria. Furthermore, Cyanobacteria share an archaeal property; the ability to reduce elemental sulfur by anaerobic respiration in the dark. The Cyanobacterial photosynthetic electron transport system shares the same compartment as the components of respiratory electron transport. Typically, the plasma membrane contains only components of the respiratory chain, while the thylakoid membrane hosts both respiratory and photosynthetic electron transport.

[0189] Phycobilisomes, attached to the thylakoid membrane, act as light harvesting antennae for the photosystems of Cyanobacteria. The phycobilisome components (phycobiliproteins) are responsible for the blue-green pigmentation of most Cyanobacteria. Color variations are mainly due to carotenoids and phycoerythrins, which may provide the cells with a red-brownish coloration. In some Cyanobacteria, the color of light influences the composition of phycobilisomes. In green light, the cells accumulate more phycoerythrin, whereas in red light they produce more phycocyanin. Thus, the bacteria appear green in red light and red in green light. This process is known as complementary chromatic adaptation and represents a way for the cells to maximize the use of available light for photosynthesis.

[0190] In particular embodiments, the Cyanobacteria may be, e.g., a marine form of Cyanobacteria or a fresh water form of Cyanobacteria. Examples of marine forms of Cyanobacteria include, but are not limited to Synechococcus WH8102, Synechococcus RCC307, Synechococcus NKBG 15041c, and Trichodesmium. Examples of fresh water forms of Cyanobacteria include, but are not limited to S. elongatus PCC7942, Synechocystis PCC6803, Plectonema boryanum, and Anabaena sp. Exogenous genetic material encoding the desired enzymes or polypeptides may be introduced either transiently, such as in certain self-replicating vectors, or stably, such as by integration (e.g., recombination) into the Cyanobacterium's native genome.

[0191] In other embodiments, a genetically modified Cyanobacteria of the present invention may be capable of growing in brackish or salt water. When using a fresh water form of Cyanobacteria, the overall net cost for production of triglycerides will depend on both the nutrients required to grow the culture and the price for freshwater. One can foresee freshwater being a limited resource in the future, and in that case it would be more cost effective to find an alternative to freshwater. Two such alternatives include: (1) the use of waste water from treatment plants; and (2) the use of salt or brackish water.

[0192] Salt water in the oceans can range in salinity between 3.1% and 3.8%, the average being 3.5%, and this is mostly, but not entirely, made up of sodium chloride (NaCl) ions. Brackish water, on the other hand, has more salinity than freshwater, but not as much as seawater. Brackish water contains between 0.5% and 3% salinity, and thus includes a large range of salinity regimes and is therefore not precisely defined. Waste water is any water that has undergone human influence. It consists of liquid waste released from domestic and commercial properties, industry, and/or agriculture and can encompass a wide range of possible contaminants at varying concentrations.

[0193] There is a broad distribution of Cyanobacteria in the oceans, with Synechococcus filling just one niche. Specifically, Synechococcus sp. PCC 7002 (formerly known as Agmenellum quadruplicatum strain PR-6) grows in brackish water, is unicellular and has an optimal growing temperature of 38° C. While this strain is well suited to grow in conditions of high salt, it will grow slowly in freshwater. In particular embodiments, the present invention contemplates the use of a Cyanobacteria S. elongatus PCC7942, altered in a way that allows for growth in either waste water or salt/brackish water. S. elongatus PCC7942 mutant resistant to sodium chloride stress has been described (Bagchi, S. N. et al., Photosynth Res. 2007, 92:87-101), and a genetically modified S. elongatus PCC7942 tolerant of growth in salt water has been described (Waditee, R. et al., PNAS 2002, 99:4109-4114). According to the present invention, a salt water tolerant strain is capable of growing in water or media having a salinity in the range of 0.5% to 4.0% salinity, although it is not necessarily capable of growing in all salinities encompassed by this range. In one embodiment, a salt tolerant strain is capable of growth in water or media having a salinity in the range of 1.0% to 2.0% salinity. In another embodiment, a salt water tolerant strain is capable of growth in water or media having a salinity in the range of 2.0% to 3.0% salinity.

[0194] Examples of Cyanobacteria that may be utilized and/or genetically modified according to the methods described herein include, but are not limited to, Chroococcales Cyanobacteria from the genera Aphanocapsa, Aphanothece, Chamaesiphon, Chroococcus, Chroogloeocystis, Coelosphaerium, Crocosphaera, Cyanobacterium, Cyanobium, Cyanodictyon, Cyanosarcina, Cyanothece, Dactylococcopsis, Gloecapsa, Gloeothece, Merismopedia, Microcystis, Radiocystis, Rhabdoderma, Snowella, Synychococcus, Synechocystis, Thermosenechococcus, and Woronichinia; Nostacales Cyanobacteria from the genera Anabaena, Anabaenopsis, Aphanizomenon, Aulosira, Calothrix, Coleodesmium, Cyanospira, Cylindrospermosis, Cylindrospermum, Fremyella, Gleotrichia, Microchaete, Nodularia, Nostoc, Rexia, Richelia, Scytonema, Sprirestis, and Toypothrix; Oscillatoriales Cyanobacteria from the genera Arthrospira, Geitlerinema, Halomicronema, Halospirulina, Katagnymene, Leptolyngbya, Limnothrix, Lyngbya, Microcoleus, Oscillatoria, Phormidium, Planktothricoides, Planktothrix, Plectonema, Pseudoanabaena/Limnothrix, Schizothrix, Spirulina, Symploca, Trichodesmium, Tychonema; Pleurocapsales cyanobacterium from the genera Chroococcidiopsis, Dermocarpa, Dermocarpella, Myxosarcina, Pleurocapsa, Stanieria, Xenococcus; Prochlorophytes Cyanobacterium from the genera Prochloron, Prochlorococcus, Prochlorothrix; and Stigonematales cyanobacterium from the genera Capsosira, Chlorogeoepsis, Fischerella, Hapalosiphon, Mastigocladopsis, Nostochopsis, Stigonema, Symphyonema, Symphonemopsis, Umezakia, and Westiellopsis. In certain embodiments, the Cyanobacterium is from the genus Synechococcus, including, but not limited to Synechococcus bigranulatus, Synechococcus elongatus, Synechococcus leopoliensis, Synechococcus lividus, Synechococcus nidulans, and Synechococcus rubescens.

[0195] In certain embodiments, the Cyanobacterium is Anabaena sp. strain PCC 7120, Synechocystis sp. strain PCC6803, Nostoc muscorum, Nostoc ellipsosporum, or Nostoc sp. strain PCC 7120. In certain preferred embodiments, the Cyanobacterium is S. elongatus sp. strain PCC7942.

[0196] Additional examples of Cyanobacteria that may be utilized in the methods provided herein include, but are not limited to, Synechococcus sp. strains WH7803, WH8102, WH8103 (typically genetically modified by conjugation), Baeocyte-forming Chroococcidiopsis spp. (typically modified by conjugation/electroporation), non-heterocyst-forming filamentous strains Planktothrix sp., Plectonema boryanum M101 (typically modified by electroporation), and Heterocyst-forming strains Anabaena sp. strains ATCC 29413 (typically modified by conjugation), Tolypothrix sp. strain PCC 7601 (typically modified by conjugation/electroporation) and Nostoc punctiforme strain ATCC 29133 (typically modified by conjugation/electroporation).

[0197] In certain preferred embodiments, the Cyanobacterium may be S. elongatus sp. strain PCC7942 or Synechococcus sp. PCC 7002 (originally known as Agmenellum quadruplicatum).

[0198] In particular embodiments, the genetically modified, photosynthetic microorganism, e.g., Cyanobacteria, of the present invention may be used to produce triglycerides and/or other carbon-containing compounds from just sunlight, water, air, and minimal nutrients, using routine culture techniques of any reasonably desired scale. In particular embodiments, the present invention contemplates using spontaneous mutants of photosynthetic microorganisms that demonstrate a growth advantage under a defined growth condition. Among other benefits, the ability to produce large amounts of triglycerides from minimal energy and nutrient input makes the modified photosynthetic microorganism, e.g., Cyanobacteria, of the present invention a readily manageable and efficient source of feedstock in the subsequent production of biofuels, such as biodiesel, and other specialty chemicals, such as glycerin.

### Methods of Producing Modified Photosynthetic Microorganisms

[0199] Methods of producing a modified photosynthetic microorganism, e.g., a Cyanobacterium, that accumulates a reduced amount of glycogen under stress conditions, e.g., reduced nitrogen, as compared to a wild-type photosynthetic microorganism, which may be used in the systems or methods of the present invention, include modifying the photosynthetic microorganism so that it has a reduced level of expression of one or more genes of a glycogen biosynthesis or storage pathway. In certain embodiments, said one or more genes include glucose-1-phosphate adenyltransferase (glgC), phosphoglucomutase (pgm), and/or glycogen synthase (glgA). In particular embodiments, expression or activity is reduced by mutating or deleting a portion or all of said one or more genes. In particular embodiments, expression or activity is reduced by knocking out or knocking down one or more alleles of said one or more genes. In particular embodiments, expression or activity of the one or more genes is reduced by contacting the photosynthetic microorganism with an antisense oligonucleotide or interfering RNA, e.g., an siRNA, that targets said one or more genes. In particular embodiments, a vector that expresses a polynucleotide that hybridizes to said one or more genes, e.g., an antisense oligonucleotide or an siRNA is introduced into said photosynthetic microorganism.

[0200] Photosynthetic microorganisms, e.g., Cyanobacteria may be genetically modified according to techniques known in the art, e.g., to delete a portion or all of a gene or to introduce a polynucleotide that expresses a functional polypeptide. As noted above, in certain aspects, genetic manipulation in photosynthetic microorganisms, e.g., Cyanobacteria, can be performed by the introduction of non-replicating vectors which contain native photosynthetic microorganism sequences, exogenous genes of interest, and selectable markers or drug resistance genes. Upon introduction into the photosynthetic microorganism, the vectors may be integrated into the photosynthetic microorganism's genome through homologous recombination. In this way, an exogenous gene of interest and the drug resistance gene are stably integrated into the photosynthetic microorganism's genome. Such recombinants cells can then be isolated from non-recombinant cells by drug selection. Cell transformation methods and selectable markers for Cyanobacteria are also well known in the art (see, e.g., Wirth, Mol Gen Genet 216:175-7, 1989; and Koksharova, Appl Microbiol Biotechnol 58:123-37, 2002; and THE CYANOBACTERIA: MOLECULAR BIOLOGY, GENETICS, AND EVOLUTION (eds. Antonio Herrera and Enrique Flores) Caister Academic Press, 2008, each of which is incorporated by reference for their description on gene transfer into Cyanobacteria, and other information on Cyanobacteria).

[0201] Generation of deletions or mutations of any of the one or more genes associated with the glycogen biosynthesis or storage or lipid biosynthesis can be accomplished according to a variety of methods known in the art, including those described and exemplified herein. For instance, the instant application describes the use of a non-replicating, selectable vector system that is targeted to the upstream and downstream flanking regions of a given gene (e.g., glgC, pgm), and which recombines with the Cyanobacterial genome at those flanking regions to replace the endogenous coding sequence with the vector sequence. Given the presence of a selectable marker in the vector sequence, such as a drug selectable marker, Cyanobacterial cells containing the gene deletion can be readily isolated, identified and characterized. Such selectable vector-based recombination methods need not be limited to targeting upstream and downstream flanking regions, but may also be targeted to internal sequences within a given gene, as long as that gene is rendered “non-functional,” as described herein.

[0202] The generation of deletions or mutations can also be accomplished using antisense-based technology. For instance, Cyanobacteria have been shown to contain natural regulatory events that rely on antisense regulation, such as a 177-nt ncRNA that is transcribed in antisense to the central portion of an iron-regulated transcript and blocks its accumulation through extensive base pairing (see, e.g., Duhring, et al., Proc. Natl. Acad. Sci. USA 103:7054-7058, 2006), as well as a alr1690 mRNA that overlaps with, and is complementary to, the complete furA gene, which acts as an antisense RNA (α-furA RNA) interfering with furA transcript translation (see, e.g., Hernandez et al., Journal of Molecular Biology 355:325-334, 2006). Thus, the incorporation of antisense molecules targeted to genes involved in glycogen biosynthesis or storage or lipid biosynthesis would be similarly expected to negatively regulate the expression of these genes, rendering them “non-functional,” as described herein.

[0203] As used herein, antisense molecules encompass both single and double-stranded polynucleotides comprising a strand having a sequence that is complementary to a target coding strand of a gene or mRNA. Thus, antisense molecules include both single-stranded antisense oligonucleotides and double-stranded siRNA molecules.

[0204] In certain aspects, modified photosynthetic microorganisms, e.g., Cyanobacteria, that may be used in the systems and methods of the present invention may be prepared by: (i) modifying a photosynthetic microorganism so that it expresses a reduced amount of one or more genes associated with a glycogen biosynthesis or storage pathway and/or expresses an increased amount of one or more polynucleotides encoding a polypeptide associated with a glycogen breakdown pathway or secretion of a glycogen precursor; and (ii) introducing into the photosynthetic microorganism one or more polynucleotides encoding one or more enzymes associated with lipid biosynthesis, secretion of glucose, isobutanol and/or isopentanol biosynthesis, 4-hydroxybutyrate and/or 1,4-butanediol biosynthesis, or polyamine intermediate biosynthesis, as described elsewhere herein, and/or (iii) introducing into the photosynthetic microorganism one or more polynucleotide regulatory elements (e.g., promoters, enhancers) that increase or otherwise regulate expression of one or more endogenous enzymes associated with lipid biosynthesis, secretion of glucose, isobutanol and/or isopentanol biosynthesis, 4-hydroxybutyrate and/or 1,4-butanediol biosynthesis, or polyamine intermediate biosynthesis; and/or (iv) modifying a photosynthetic microorganism so that it expresses a reduced amount and/or a reduced-function mutant of one or more selected genes/polypeptides associated with lipid biosynthesis, as described herein. The methods may further comprise a step of: (v) selecting for photosynthetic microorganisms in which the one or more desired polynucleotides were successfully introduced, where the polyucleotides were, e.g., present in a vector the expressed a selectable marker, such as an antibiotic resistance gene. As one example, selection and isolation may include the use of antibiotic resistant markers known in the art (e.g., kanamycin, spectinomycin, and streptomycin).

[0205] Other modifications described herein may be produced using standard procedures and reagents, e.g., vectors, available in the art. Related methods are described in PCT Application No. WO 2010/075440, which is hereby incorporated by reference in its entirety.

### Methods of Producing Lipids

[0206] The systems and methods of the present invention may be used to produce lipids, such as fatty acids, triglycerides, alkanes/alkenes, fatty alcohols, and/or wax esters. Accordingly, the present invention provides methods of producing lipids comprising culturing any of the modified photosynthetic microorganisms described herein under stress conditions wherein the modified photosynthetic microorganism produces, secretes and/or accumulates (e.g., stores,) an increased amount of cellular lipid as compared to a corresponding wild-type or unmodified photosynthetic microorganism grown under said stress condition.

[0207] In one embodiment, the modified photosynthetic microorganism is a Cyanobacterium that produces or accumulates increased fatty acids relative to an unmodified or wild-type Cyanobacterium of the same species grown under said stress condition. In specific embodiments, the modified photosynthetic microorganism such as Cyanobacteria produces increased levels of particular fatty acids, such as C16:0 fatty acids. In certain embodiments, the modified photosynthetic microorganism is a Cyanobacterium that produces or accumulates increased wax esters relative to an unmodified or wild-type Cyanobacterium of the same species when grown under said stress condition. In particular embodiments, the modified photosynthetic microorganism is a Cyanobacterium that produces or accumulates increased triglycerides relative to an unmodified or wild-type Cyanobacterium of the same species when grown under said stress condition. In some embodiments, the modified photosynthetic microorganism is a Cyanobacterium that produces or accumulates increased alkanes and/or alkenes relative to an unmodified or wild-type Cyanobacterium of the same species when grown under said stress condition.

[0208] In certain embodiments, the one or more introduced polynucleotides are present in one or more expression constructs. In particular embodiments, the one or more expression constructs comprises one or more inducible promoters. In certain embodiments, the one or more expression constructs are stably integrated into the genome of said modified photosynthetic microorganism. In certain embodiments, the introduced polynucleotide encoding an introduced protein is present in an expression construct comprising a weak promoter under non-induced conditions. In certain embodiments, one or more of the introduced polynucleotides are codon-optimized for expression in a Cyanobacterium, e.g., a Synechococcus elongatus.

[0209] In particular embodiments, the photosynthetic microorganism is a Synechococcus elongatus, such as Synechococcus elongatus strain PCC7942 or a salt tolerant variant of Synechococcus elongatus strain PCC7942.

[0210] In particular embodiments, the photosynthetic microorganism is a Synechococcus sp. PCC 7002 or a Synechocystis sp. PCC6803.

[0211] In particular embodiments, the modified photosynthetic microorganisms are cultured under conditions suitable for inducing expression of the introduced polynucleotide(s), e.g., wherein the introduced polynucleotide(s) comprise an inducible promoter. Conditions and reagents suitable for inducing inducible promoters are known and available in the art. Also included are the use of auto-inductive systems, for example, where a metabolite represses expression of the introduced polynucleotide, and the use of that metabolite by the microorganism over time decreases its concentration and thus its repressive activities, thereby allowing increased expression of the polynucleotide sequence.

[0212] In certain embodiments, modified photosynthetic microorganisms, e.g., Cyanobacteria, are grown under conditions favorable for producing lipids, triglycerides and/or fatty acids. In particular embodiments, light intensity is between 100 and 2000 uE/m2/s, or between 200 and 1000 uE/m2/s. In particular embodiments, the pH range of culture media is between 7.0 and 10.0. In certain embodiments, CO₂ is injected into the culture apparatus to a level in the range of 1% to 10%. In particular embodiments, the range of CO₂ is between 2.5% and 5%. In certain embodiments, nutrient supplementation is performed during the linear phase of growth. Each of these conditions may be desirable for triglyceride production.

[0213] In certain embodiments, the modified photosynthetic microorganisms are cultured, at least for some time, under static growth conditions as opposed to shaking conditions. For example, the modified photosynthetic microorganisms may be cultured under static conditions prior to inducing expression of an introduced polynucleotide (e.g., acyl-ACP reductase, ACP, glycogen breakdown protein, ACCase, DGAT, fatty acyl-CoA synthetase, aldehyde dehydrogenase, alcohol dehydrogenase, aldehyde decarbonylase) and/or the modified photosynthetic microorganism may be cultured under static conditions while expression of an introduced polynucleotide is being induced, or during a portion of the time period during which expression on an introduced polynucleotide is being induced. Static growth conditions may be defined, for example, as growth without shaking or growth wherein the cells are shaken at less than or equal to 30 rpm or less than or equal to 50 rpm.

[0214] In certain embodiments, the modified photosynthetic microorganisms are cultured, at least for some time, in media supplemented with varying amounts of bicarbonate. For example, the modified photosynthetic microorganisms may be cultured with bicarbonate at 5, 10, 20, 50, 75, 100, 200, 300, 400, 500, 600, 700, 800, 900, 1000 mM bicarbonate prior to inducing expression of an introduced polynucleotide (e.g., acyl-ACP reductase, ACP, glycogen breakdown protein, ACCase, DGAT, fatty acyl-CoA synthetase, alcohol dehydrogenase, aldehyde dehydrogenase, aldehyde decarbonylase) and/or the modified photosynthetic microorganism may be cultured with aforementioned bicarbonate concentrations while expression of an introduced polynucleotide is being induced, or during a portion of the time period during which expression on an introduced polynucleotide is being induced.

[0215] In related embodiments, modified photosynthetic microorganisms and methods of the present invention may be used in the production of a biofuel or other specialty chemical. Thus, in particular embodiments, a method of producing a biofuel comprises culturing any of the modified photosynthetic microorganisms of the present invention under conditions wherein the modified photosynthetic microorganism accumulates an increased amount of total cellular lipid (e.g., fatty acid, wax ester, alkane/alkene, fatty alcohol, and/or triglyceride), as compared to a corresponding wild-type photosynthetic microorganism, obtaining the cellular lipid from said microorganism, and processing the obtained cellular lipid to produce a biofuel. In another embodiment, a method of producing a biofuel comprises processing lipids (e.g., fatty acids, wax esters, alkanes/alkenes, fatty alcohols, triglycerides) produced by a modified photosynthetic microorganism of the present invention to produce a biofuel. In particular embodiments, the modified photosynthetic microorganism is grown under stress conditions wherein it has reduced growth but maintains photosynthesis.

[0216] Methods of processing lipids from microorganisms to produce a biofuel or other specialty chemical, e.g., biodiesel, are known and available in the art. For example, triglycerides may be transesterified to produce biodiesel. Transesterification may be carried out by any one of the methods known in the art, such as alkali-, acid-, or lipase-catalysis (see, e.g., Singh et al. Recent Pat Biotechnol. 2008, 2(2):130-143). Various methods of transesterification utilize, for example, use of a batch reactor, a supercritical alcohol, an ultrasonic reactor, or microwave irradiation (Such methods are described, for example, in Jeong and Park, Appl Biochem Biotechnol. 2006, 131(1-3):668-679; Fukuda et al., Journal of Bioscience and Engineering. 2001, 92(5):405-416; Shah and Gupta, Chemistry Central Journal. 2008, 2(1):1-9; and Carrillo-Munoz et al., J Org Chem. 1996, 61(22):7746-7749). The biodiesel may be further processed or purified, e.g., by distillation, and/or a biodiesel stabilizer may be added to the biodiesel, as described, for example, in U.S. Patent Application Publication No. 2008/0282606.

### Polypeptides

[0217] Modified photosynthetic microorganisms of the present invention comprise one or more introduced or (over)expressed polypeptides, reduced expression and/or activity of one or more polypeptides, or a combination thereof. In particular embodiments, the photosynthetic microorganisms described herein have been modified to accumulate a reduced amount of glycogen as compared to a corresponding wild-type photosynthetic microorganism. As one example, such modified photosynthetic microorganism my comprise reduced expression and/or activity of one or more polypeptides associated with glycogen synthesis and/or glycogen storage. Alternatively or in combination with the above, such modified photosynthetic microorganism may comprise one or more introduced or overexpressed polypeptides associated with glycogen breakdown and/or secretion of glycogen precursors. Examples of such glycogen-associated polypeptides are described below.

[0218] These modified photosynthetic microorganism can optionally further comprise one or more introduced, expressed, or overexpressed lipid biosynthesis proteins, e.g., one or more proteins associated with fatty acid synthesis, triglyceride synthesis, alkane synthesis, wax ester synthesis, or other lipid synthesis pathway described herein. Certain aspects, however, may comprise reduced expression and/or activity of one or more selected lipid biosynthesis proteins, for instance, to shunt carbon away from one lipid and towards another lipid. Examples of polypeptides associated with lipid biosynthesis are also described below.

[0219] The modified photosynthetic microorganisms described herein can optionally comprise one or more introduced, expressed or overexpressed polypeptides associated with the secretion or synthesis of other carbon-containing compounds described herein, including polypeptides associated with the secretion of glucose and polypeptides associated with the synthesis of isobutanol, isopentanol, 4-hydroxybutyrate, 1,4-butanediol, and polyamines and intermediates thereof.

[0220] It is further understood that the compositions and methods of the present invention may be practiced using biologically active variants and/or fragments of any of these or other introduced or overexpressed polypeptides. As will be apparent, modified photosynthetic microorganisms of the present invention may comprise any combination of one or more of the additional modifications noted herein.

### Glycogen Synthesis, Storage, and Breakdown Proteins

[0221] The modified photosynthetic microorganisms of the present invention have reduced production and/or storage of glycogen. For instance, certain modified photosynthetic microorganisms described herein have reduced expression and/or activity of one or more polypeptides associated with a glycogen synthesis or storage pathway and/or increased expression of one or more polypeptides associated with a glycogen breakdown pathway, or a functional variant of fragment thereof. Also included are modifications that increase secretion of a glycogen precursor, for instance, by overexpressing one or more polypeptides associated with glycogen precursor secretion.

[0222] In various embodiments, modified photosynthetic microorganisms, e.g., Cyanobacteria, of the present invention have reduced expression of one or more polypeptides associated with glycogen synthesis and/or storage. In particular embodiments, these modified photosynthetic microorganisms have a mutated or deleted gene that encodes a polypeptide associated with glycogen synthesis and/or storage. In particular embodiments, these modified photosynthetic microorganisms comprise a vector that includes a portion of a mutated or deleted gene, e.g., a targeting vector used to generate a knockout or knockdown of one or more alleles of the mutated or deleted gene. In certain embodiments, these modified photosynthetic microorganisms comprise an antisense RNA or siRNA that binds to an mRNA expressed by a gene associated with glycogen synthesis and/or storage.

[0223] In certain embodiments, modified photosynthetic microorganisms, e.g., Cyanobacteria, of the present invention comprise one or more exogenous or introduced nucleic acids that encode a polypeptide having an activity associated with a glycogen breakdown or triglyceride or fatty acid biosynthesis, including but not limited to any of those described herein. In particular embodiments, the exogenous nucleic acid does not comprise a nucleic acid sequence that is native to the microorganism's genome. In particular embodiments, the exogenous nucleic acid comprises a nucleic acid sequence that is native to the microorganism's genome, but it has been introduced into the microorganism, e.g., in a vector or by molecular biology techniques, for example, to increase expression of the nucleic acid and/or its encoded polypeptide in the microorganism.

[0224] Glycogen Biosynthesis and Storage.

[0225] Glycogen is a polysaccharide of glucose, which functions as a means of carbon and energy storage in most cells, including animal and bacterial cells. More specifically, glycogen is a very large branched glucose homopolymer containing about 90% α-1,4-glucosidic linkages and 10% α-1,6 linkages. For bacteria in particular, the biosynthesis and storage of glycogen in the form of α-1,4-polyglucans represents an important strategy to cope with transient starvation conditions in the environment.

[0226] Glycogen biosynthesis involves the action of several enzymes. For instance, bacterial glycogen biosynthesis occurs generally through the following general steps: (1) formation of glucose-1-phosphate, catalyzed by phosphoglucomutase (Pgm), followed by (2) ADP-glucose synthesis from ATP and glucose 1-phosphate, catalyzed by glucose-1-phosphate adenylyltransferase (GlgC), followed by (3) transfer of the glucosyl moiety from ADP-glucose to a pre-existing α-1,4 glucan primer, catalyzed by glycogen synthase (GlgA). This latter step of glycogen synthesis typically occurs by utilizing ADP-glucose as the glucosyl donor for elongation of the α-1,4-glucosidic chain.

[0227] In bacteria, the main regulatory step in glycogen synthesis takes place at the level of ADP-glucose synthesis, or step (2) above, the reaction catalyzed by glucose-1-phosphate adenylyltransferase (GlgC), also known as ADP-glucose pyrophosphorylase (see, e.g., Ballicora et al., Microbiology and Molecular Biology Reviews 6:213-225, 2003). In contrast, the main regulatory step in mammalian glycogen synthesis occurs at the level of glycogen synthase. As shown herein, by altering the regulatory and/or other active components in the glycogen synthesis pathway of photosynthetic microorganisms such as Cyanobacteria, and thereby reducing the biosynthesis and storage of glycogen, the carbon that would have otherwise been stored as glycogen can be utilized by said photosynthetic microorganism to synthesize other carbon-containing storage molecules, such as lipids, fatty acids, and triglycerides.

[0228] Therefore, certain modified photosynthetic microorganisms, e.g., Cyanobacteria, of the present invention may comprise a mutation, deletion, or any other alteration that disrupts one or more of these steps (i.e., renders the one or more steps “non-functional” with respect to glycogen biosynthesis and/or storage), or alters any one or more of the enzymes directly involved in these steps, or the genes encoding them. As noted above, such modified photosynthetic microorganisms, e.g., Cyanobacteria, are typically capable of producing and/or accumulating an increased amount of lipids, such as fatty acids, as compared to a wild-type photosynthetic microorganism. Certain exemplary glycogen biosynthesis genes are described below.

[0229] Phosphoglucomutase Gene (Ppm).

[0230] In one embodiment, a modified photosynthetic microorganism, e.g., a Cyanobacteria, expresses a reduced amount of the phosphoglucomutase gene. In particular embodiments, it may comprise a mutation or deletion in the phosphoglucomutase gene, including any of its regulatory elements (e.g., promoters, enhancers, transcription factors, positive or negative regulatory proteins, etc.). Phosphoglucomutase (Pgm), encoded by the gene pgm, catalyzes the reversible transformation of glucose 1-phosphate into glucose 6-phosphate, typically via the enzyme-bound intermediate, glucose 1,6-biphosphate (see, e.g., Lu et al., Journal of Bacteriology 176:5847-5851, 1994). Although this reaction is reversible, the formation of glucose-6-phosphate is markedly favored.

[0231] However, typically when a large amount of glucose-6-phosphate is present, Pgm catalyzes the phosphorylation of the 1-carbon and the dephosphorylation of the c-carbon, resulting in glucose-1-phosphate. The resulting glucose-1-phosphate is then converted to UDP-glucose by a number of intermediate steps, including the catalytic activity of GlgC, which can then be added to a glycogen storage molecule by the activity of glycogen synthase, described below. Thus, under certain conditions, the Pgm enzyme plays an intermediary role in the biosynthesis and storage of glycogen.

[0232] The pgm gene is expressed in a wide variety of microorganisms, including most, if not all, Cyanobacteria. The pgm gene is also fairly conserved among Cyanobacteria, as can be appreciated upon comparison of SEQ ID NOs:24 (S. elongatus PCC7942), 25 (Synechocystis sp. PCC6803), and 26 (Synechococcus sp. WH8102), which provide the polynucleotide sequences of various pgm genes from Cyanobacteria.

[0233] Deletion of the pgm gene in Cyanobacteria, such as Synechococcus, has been demonstrated herein for the first time to reduce the accumulation of glycogen in said Cyanobacteria, and also to increase the production of other carbon-containing compounds, such as lipids, biofuels, other specialty chemicals, and precursors thereof.

[0234] Glucose-1-Phosphate Adenylyltransferase (glgC).

[0235] In one embodiment, a modified photosynthetic microorganism, e.g., a Cyanobacteria, expresses a reduced amount of a glucose-1-phosphate adenylyltransferase (glgC) gene. In certain embodiments, it may comprise a mutation or deletion in the glgC gene, including any of its regulatory elements. The enzyme encoded by the glgC gene (e.g., EC 2.7.7.27) participates generally in starch, glycogen and sucrose metabolism by catalyzing the following chemical reaction:

ATP+alpha-D-glucose 1-phosphate [symbol] diphosphate+ADP-glucose

[0236] Thus, the two substrates of this enzyme are ATP and alpha-D-glucose 1-phosphate, whereas its two products are diphosphate and ADP-glucose. The glgC-encoded enzyme catalyzes the first committed and rate-limiting step in starch biosynthesis in plants and glycogen biosynthesis in bacteria. It is the enzymatic site for regulation of storage polysaccharide accumulation in plants and bacteria, being allosterically activated or inhibited by metabolites of energy flux.

[0237] The enzyme encoded by the glgC gene belongs to a family of transferases, specifically those transferases that transfer phosphorus-containing nucleotide groups (i.e., nucleotidyl-transferases). The systematic name of this enzyme class is typically referred to as ATP:alpha-D-glucose-1-phosphate adenylyltransferase. Other names in common use include ADP glucose pyrophosphorylase, glucose 1-phosphate adenylyltransferase, adenosine diphosphate glucose pyrophosphorylase, adenosine diphosphoglucose pyrophosphorylase, ADP-glucose pyrophosphorylase, ADP-glucose synthase, ADP-glucose synthetase, ADPG pyrophosphorylase, and ADP:alpha-D-glucose-1-phosphate adenylyltransferase.

[0238] The glgC gene is expressed in a wide variety of plants and bacteria, including most, if not all, Cyanobacteria. The glgC gene is also fairly conserved among Cyanobacteria, as can be appreciated upon comparison of SEQ ID NOs:27 (S. elongatus PCC7942), 28 (Synechocystis sp. PCC6803), 29 (Synechococcus sp. PCC 7002), 30 (Synechococcus sp. WH8102), 31 (Synechococcus sp. RCC 307), 32 (Trichodesmium erythraeum IMS 101), 33 (Anabaena varibilis), and 34 (Nostoc sp. PCC 7120), which describe the polynucleotide sequences of various glgC genes from Cyanobacteria.

[0239] Deletion of the glgC gene in Cyanobacteria, such as Synechococcus, has been demonstrated herein for the first time to reduce the accumulation of glycogen in said Cyanobacteria, and also to increase the production of other carbon-containing compounds, such as lipids and fatty acids.

[0240] Glycogen Synthase (glgA).

[0241] In one embodiment, a modified photosynthetic microorganism, e.g., a Cyanobacteria, expresses a reduced amount of a glycogen synthase gene. In particular embodiments, it may comprise a deletion or mutation in the glycogen synthase gene, including any of is regulatory elements. Glycogen synthase (GlgA), also known as UDP-glucose-glycogen glucosyltransferase, is a glycosyltransferase enzyme that catalyses the reaction of UDP-glucose and (1,4-α-D-glucosyl)ₙ to yield UDP and (1,4-α-D-glucosyl)ₙ₊₁. Glycogen synthase is an α-retaining glucosyltransferase that uses ADP-glucose to incorporate additional glucose monomers onto the growing glycogen polymer. Essentially, GlgA catalyzes the final step of converting excess glucose residues one by one into a polymeric chain for storage as glycogen.

[0242] Classically, glycogen synthases, or α-1,4-glucan synthases, have been divided into two families, animal/fungal glycogen synthases and bacterial/plant starch synthases, according to differences in sequence, sugar donor specificity and regulatory mechanisms. However, detailed sequence analysis, predicted secondary structure comparisons, and threading analysis show that these two families are structurally related and that some domains of animal/fungal synthases were acquired to meet the particular regulatory requirements of those cell types.

[0243] Crystal structures have been established for certain bacterial glycogen synthases (see, e.g., Buschiazzo et al., The EMBO Journal 23, 3196-3205, 2004). These structures show that reported glycogen synthase folds into two Rossmann-fold domains organized as in glycogen phosphorlyase and other glycosyltransferases of the glycosyltransferases superfamily, with a deep fissure between both domains that includes the catalytic center. The core of the N-terminal domain of this glycogen synthase consists of a nine-stranded, predominantly parallel, central β-sheet flanked on both sides by seven α-helices. The C-terminal domain (residues 271-456) shows a similar fold with a six-stranded parallel β-sheet and nine α-helices. The last α-helix of this domain undergoes a kink at position 457-460, with the final 17 residues of the protein (461-477) crossing over to the N-terminal domain and continuing as α-helix, a typical feature of glycosyltransferase enzymes.

[0244] These structures also show that the overall fold and the active site architecture of glycogen synthase are remarkably similar to those of glycogen phosphorylase, the latter playing a central role in the mobilization of carbohydrate reserves, indicating a common catalytic mechanism and comparable substrate-binding properties. In contrast to glycogen phosphorylase, however, glycogen synthase has a much wider catalytic cleft, which is predicted to undergo an important interdomain ‘closure’ movement during the catalytic cycle.

[0245] Crystal structures have been established for certain GlgA enzymes (see, e.g., Jin et al., EMBO J 24:694-704, 2005, incorporated by reference). These studies show that the N-terminal catalytic domain of GlgA resembles a dinucleotide-binding Rossmann fold and the C-terminal domain adopts a left-handed parallel beta helix that is involved in cooperative allosteric regulation and a unique oligomerization. Also, communication between the regulator-binding sites and the active site involves several distinct regions of the enzyme, including the N-terminus, the glucose-1-phosphate-binding site, and the ATP-binding site.

[0246] The glgA gene is expressed in a wide variety of cells, including animal, plant, fungal, and bacterial cells, including most, if not all, Cyanobacteria. The glgA gene is also fairly conserved among Cyanobacteria, as can be appreciated upon comparison of SEQ ID NOs:35 (S. elongatus PCC7942), 36 (Synechocystis sp. PCC6803), 37 (Synechococcus sp. PCC 7002), 38 (Synechococcus sp. WH8102), 39 (Synechococcus sp. RCC 307), 40 (Trichodesmium erythraeum IMS 101), 41 (Anabaena variabilis), and 42 (Nostoc sp. PCC 7120), which describe the polynucleotide sequences of various glgA genes from Cyanobacteria.

[0247] Glycogen Breakdown.

[0248] In certain embodiments, a modified photosynthetic microorganism of the present invention expresses an increased amount of one or more polypeptides associated with a glycogen breakdown pathway. In particular embodiments, said one or more polypeptides include a glycogen phosphorylase (GlgP), glycogen isoamylase (GlgX), glucanotransferase (MalQ), phosphoglucomutase (Pgm), glucokinase (Glk), and/or phosphoglucose isomerase (Pgi), or a functional fragment or variant thereof, including, for example, those provided in SEQ ID NOs:68, 70, 72, 73, 83 or 85. Examples of additional Pgm polypeptide sequences useful according to the present invention are provided in SEQ ID NOs:74, 76, 77, 79, and 81. As noted above, Pgm, Glk, and Pgi are bidirectional enzymes that can promote glycogen synthesis or breakdown depending on conditions.

### Lipid Biosynthesis Proteins

[0249] In various embodiments, and further to modifications that reduce production and/or storage of glycogen, certain modified photosynthetic microorganisms of the present invention further comprise one or more introduced or overexpressed lipid biosynthesis proteins, e.g., polypeptide(s) having an activity associated with lipid biosynthesis, including triglyceride, fatty acid, fatty alcohol, alkane/alkene, and/or wax ester biosynthesis, In some instances, a modified photosynthetic microorganism may comprise reduced expression and/or activity of one or more selected lipid biosynthesis proteins. Certain of these proteins are described in greater detail below.

[0250] In particular embodiments, an exogenous nucleic acid encoding a lipid biosynthesis protein does not comprise a nucleic acid sequence that is native to the microorganism's genome. In some embodiments, an exogenous nucleic acid comprises a nucleic acid sequence that is native to the microorganism's genome, but it has been introduced into the microorganism, e.g., in a vector or by molecular biology techniques, for example, to increase expression of the nucleic acid and/or its encoded polypeptide in the microorganism. In certain embodiments, the expression of a native or endogenous nucleic acid and its corresponding protein can be increased by introducing a heterologous promoter upstream of the native gene. As noted above, lipid biosynthesis proteins can be involved in triglyceride biosynthesis, fatty acid synthesis, wax ester synthesis, fatty alcohol synthesis, alkane synthesis, or any combination thereof.

[0251] Triglyceride Biosynthesis.

[0252] Triglycerides, or triacylglycerols (TAGs), consist primarily of glycerol esterified with three fatty acids, and yield more energy upon oxidation than either carbohydrates or proteins. Triglycerides provide an important mechanism of energy storage for most eukaryotic microorganisms. In mammals, TAGs are synthesized and stored in several cell types, including adipocytes and hepatocytes (Bell et al. Annu. Rev. Biochem. 49:459-487, 1980) (herein incorporated by reference). In plants, TAG production is mainly important for the generation of seed oils.

[0253] In contrast to eukaryotes, the observation of triglyceride production in prokaryotes has been limited to certain actinomycetes, such as members of the genera Mycobacterium, Nocardia, Rhodococcus and Streptomyces, in addition to certain members of the genus Acinetobacter. In certain Actinomycetes species, triglycerides may accumulate to nearly 80% of the dry cell weight, but accumulate to only about 15% of the dry cell weight in Acinetobacter. In general, triglycerides are stored in spherical lipid bodies, with quantities and diameters depending on the respective species, growth stage, and cultivation conditions. For example, cells of Rhodococcus opacus and Streptomyces lividans contain only few TAGs when cultivated in complex media with a high content of carbon and nitrogen; however, the lipid content and the number of TAG bodies increase drastically when the cells are cultivated in mineral salt medium with a low nitrogen-to-carbon ratio, yielding a maximum in the late stationary growth phase. At this stage, cells can be almost completely filled with lipid bodies exhibiting diameters ranging from 50 to 400 nm. One example is R. opacus PD630, in which lipids can reach more than 70% of the total cellular dry weight.

[0254] In bacteria, TAG formation typically starts with the docking of a diacylglycerol acyltransferase enzyme to the plasma membrane, followed by formation of small lipid droplets (SLDs). These SLDs are only some nanometers in diameter and remain associated with the membrane-docked enzyme. In this phase of lipid accumulation, SLDs typically form an emulsive, oleogenous layer at the plasma membrane. During prolonged lipid synthesis, SLDs leave the membrane-associated acyltransferase and conglomerate to membrane-bound lipid prebodies. These lipid prebodies reach distinct sizes, e.g., about 200 nm in A. calcoaceticus and about 300 nm in R. opacus, before they lose contact with the membrane and are released into the cytoplasm. Free and membrane-bound lipid prebodies correspond to the lipid domains occurring in the cytoplasm and at the cell wall, as observed in M. smegmatis during fluorescence microscopy and also confirmed in R. opacus PD630 and A. calcoaceticus ADP1 (see, e.g., Christensen et al., Mol. Microbiol. 31:1561-1572, 1999; and Wältermann et al., Mol. Microbiol. 55:750-763, 2005). Inside the lipid prebodies, SLDs coalesce with each other to form the homogenous lipid core found in mature lipid bodies, which often appear opaque in electron microscopy. The compositions and structures of bacterial TAGs vary considerably depending on the microorganism and on the carbon source. In addition, unusual acyl moieties, such as phenyldecanoic acid and 4,8,12 trimethyl tridecanoic acid, may also contribute to the structural diversity of bacterial TAGs (see, e.g., Alvarez et al., Appl Microbiol Biotechnol. 60:367-76, 2002).

[0255] As with eukaryotes, the main function of TAGs in prokaryotes is to serve as a storage compound for energy and carbon. TAGs, however, may provide other functions in prokaryotes. For example, lipid bodies may act as a deposit for toxic or useless fatty acids formed during growth on recalcitrant carbon sources, which must be excluded from the plasma membrane and phospholipid (PL) biosynthesis. Furthermore, many TAG-accumulating bacteria are ubiquitous in soil, and in this habitat, water deficiency causing dehydration is a frequent environmental stress. Storage of evaporation-resistant lipids might be a strategy to maintain a basic water supply, since oxidation of the hydrocarbon chains of the lipids under conditions of dehydration would generate considerable amounts of water. Cyanobacteria such as Synechococcus, however, do not produce triglycerides, because these microorganisms lack the enzymes necessary for triglyceride biosynthesis.

[0256] Triglycerides are synthesized from fatty acids and glycerol. As one mechanism of triglyceride (TAG) synthesis, sequential acylation of glycerol-3-phosphate via the “Kennedy Pathway” leads to the formation of phosphatidate. Phosphatidate is then dephosphorylated by the enzyme phosphatidate phosphatase to yield 1,2 diacylglycerol (DAG). Using DAG as a substrate, at least three different classes of enzymes are capable of mediating TAG formation. As one example, an enzyme having diacylglycerol acyltransferase (DGAT) activity catalyzes the acylation of DAG using acyl-CoA as a substrate. Essentially, DGAT enzymes combine acyl-CoA with 1,2 diacylglycerol molecule to form a TAG. As an alternative, Acyl-CoA-independent TAG synthesis may be mediated by a phospholipid:DAG acyltransferase found in yeast and plants, which uses phospholipids as acyl donors for DAG esterification. Third, TAG synthesis in animals and plants may be mediated by a DAG-DAG-transacylase, which uses DAG as both an acyl donor and acceptor, yielding TAG and monoacylglycerol.

[0257] Since wild-type Cyanobacteria do not typically encode the enzymes necessary for triglyceride synthesis, such as the enzymes having diacylglycerol acyltransferase activity, embodiments of the present invention include genetically modified Cyanobacteria that comprise polynucleotides encoding one or more enzymes having a diacylglycerol acyltransferase activity, optionally in combination with one or more enzymes having a fatty acyl-CoA synthetase activity.

[0258] Moreover, since triglycerides are typically formed from fatty acids, the level of fatty acid biosynthesis in a cell may limit the production of triglycerides. Increasing the level of fatty acid biosynthesis may, therefore, allow increased production of triglycerides. As discussed below, acetyl-CoA carboxylase catalyzes the commitment step to fatty acid biosynthesis. Thus, certain embodiments of the present invention include Cyanobacterium, and methods of use thereof, comprising polynucleotides that encode one or more enzymes having Acetyl-CoA carboxylase activity to increase fatty acid biosynthesis and lipid production, in addition to one or more enzymes having diacylglycerol acyltransferase activity and one or more enzymes having fatty acyl-CoA synthetase activity, to catalyze triglyceride production.

[0259] Fatty Acid Biosynthesis.

[0260] Fatty acids are a group of negatively charged, linear hydrocarbon chains of various length and various degrees of oxidation states. The negative charge is located at a carboxyl end group and is typically deprotonated at physiological pH values (pK ˜2-3). The length of the fatty acid ‘tail’ determines its water solubility (or rather insolubility) and amphipathic characteristics. Fatty acids are components of phospholipids and sphingolipids, which form part of biological membranes, as well as triglycerides, which are primarily used as energy storage molecules inside cells.

[0261] Fatty acids are formed from acetyl-CoA and malonyl-CoA precursors. Malonyl-CoA is a carboxylated form of acetyl-CoA, and contains a 3-carbon dicarboxylic acid, malonate, bound to Coenzyme A. Acetyl-CoA carboxylase catalyzes the 2-step reaction by which acetyl-CoA is carboxylated to form malonyl-CoA. In particular, malonate is formed from acetyl-CoA by the addition of CO₂ using the biotin cofactor of the enzyme acetyl-CoA carboxylase.

[0262] Fatty acid synthase (FAS) carries out the chain elongation steps of fatty acid biosynthesis. FAS is a large multienzyme complex. In mammals, FAS contains two subunits, each containing multiple enzyme activities. In bacteria and plants, individual proteins, which associate into a large complex, catalyze the individual steps of the synthesis scheme. For example, in bacteria and plants, the acyl carrier protein is a smaller, independent protein.

[0263] Fatty acid synthesis starts with acetyl-CoA, and the chain grows from the “tail end” so that carbon 1 and the alpha-carbon of the complete fatty acid are added last. The first reaction is the transfer of an acetyl group to a pantothenate group of acyl carrier protein (ACP), a region of the large mammalian fatty acid synthase (FAS) protein. In this reaction, acetyl CoA is added to a cysteine —SH group of the condensing enzyme (CE) domain: acetyl CoA+CE-cys-SH->acetyl-cys-CE+CoASH. Mechanistically, this is a two step process, in which the group is first transferred to the ACP (acyl carrier peptide), and then to the cysteine —SH group of the condensing enzyme domain.

[0264] In the second reaction, malonyl CoA is added to the ACP sulfhydryl group: malonyl CoA+ACP-SH->malonyl ACP+CoASH. This —SH group is part of a phosphopantethenic acid prosthetic group of the ACP.

[0265] In the third reaction, the acetyl group is transferred to the malonyl group with the release of carbon dioxide: malonyl ACP+acetyl-cys-CE->beta-ketobutyryl-ACP+CO₂.

[0266] In the fourth reaction, the keto group is reduced to a hydroxyl group by the beta-ketoacyl reductase activity: beta-ketobutyryl-ACP+NADPH+H⁺->beta-hydroxybutyryl-ACP+NAD⁺.

[0267] In the fifth reaction, the beta-hydroxybutyryl-ACP is dehydrated to form a trans-monounsaturated fatty acyl group by the beta-hydroxyacyl dehydratase activity: beta-hydroxybutyryl-ACP->2-butenoyl-ACP+H₂O.

[0268] In the sixth reaction, the double bond is reduced by NADPH, yielding a saturated fatty acyl group two carbons longer than the initial one (an acetyl group was converted to a butyryl group in this case): 2-butenoyl-ACP+NADPH+H⁺->butyryl-ACP+NADP⁺. The butyryl group is then transferred from the ACP sulfhydryl group to the CE sulfhydryl: butyryl-ACP+CE-cys-SH->ACP-SH+butyryl-cys-CE. This step is catalyzed by the same transferase activity utilized previously for the original acetyl group. The butyryl group is now ready to condense with a new malonyl group (third reaction above) to repeat the process. When the fatty acyl group becomes 16 carbons long, a thioesterase activity hydrolyses it, forming free palmitate: palmitoyl-ACP+H₂O->palmitate+ACP-SH. Fatty acid molecules can undergo further modification, such as elongation and/or desaturation.

[0269] Modified photosynthetic microorganisms, e.g., Cyanobacteria, may comprise one or more exogenous polynucleotides encoding any of the above polypeptides or enzymes involved in fatty acid synthesis. In particular embodiments, the enzyme is an acetyl-CoA carboxylase or a variant or functional fragment thereof.

[0270] Wax Ester Synthesis.

[0271] Wax esters are esters of a fatty acid and a long-chain alcohol. These neutral lipids are composed of aliphatic alcohols and acids, with both moieties usually long-chain (e.g., C₁₆ and C₁₈) or very-long-chain (C₂₀ and longer) carbon structures, though medium-chain-containing wax esters are included (e.g., C₁₀, C₁₂ and C₁₄). Wax esters have diverse biological functions in bacteria, insects, mammals, and terrestrial plants and are also important substrates for a variety of industrial applications. Various types of wax ester are widely used in the manufacture of fine chemicals such as cosmetics, candles, printing inks, lubricants, coating stuffs, and others.

[0272] In certain microorganisms, such as Acinetobacter, the pathway for wax ester synthesis of Acinetobacter spp. has been assumed to start from acyl coenzyme A (acyl-CoA), which is then reduced to the corresponding alcohol via acyl-CoA reductase and aldehyde reductase. In other microorganisms, for example, wax ester biosynthesis involves elongation of saturated C₁₆ and C₁₈ fatty acyl-CoAs to very-long-chain fatty acid wax precursors between 24 and 34 carbons in length, and their subsequent modification by either the alkane-forming (decarbonylation) or the alcohol-forming (acyl reduction) pathway (see Li et al., Plant Physiology 148:97-107, 2008).

[0273] In certain aspects, wax ester synthesis can occur via the acyl-ACP=>acyl aldehyde pathway. In this pathway, acyl-ACP reductase overexpression increases conversion of acyl-ACP into acyl aldehydes, alcohol dehydrogenase overexpression then increases conversion of acyl aldehydes into fatty alcohols, and DGAT overexpression cooperatively increases conversion of the fatty alcohols into their corresponding wax esters. Modified photosynthetic microorganisms, e.g., Cyanobacteria, may therefore comprise one or more exogenous polynucleotides encoding any of the above polypeptides or enzymes involved in wax ester synthesis.

[0274] Acyl-ACP Reductases.

[0275] Acyl-ACP reductases (or acyl-ACP dehydrogenases) are members of the reductase or short-chain dehydrogenase family, and are key enzymes of the type II fatty acid synthesis (FAS) system. Among other potential catalytic activities, an “acyl-ACP reductase” or “acyl-ACP dehydrogenase” as used herein is capable of catalyzing the conversion (reduction) of acyl-ACP to an acyl aldehyde (see Schirmer et al., supra) and the concomitant oxidation of NAD(P)H to NADP⁺. In some embodiments, the acyl-ACP reductase preferentially interacts with acyl-ACP, and does not interact significantly with acyl-CoA, i.e., it does not significantly catalyze the conversion of acyl-CoA to acyl aldehyde.

[0276] Acyl-ACP reductases can be derived from a variety of plants and bacteria, included photosynthetic microorganisms such as Cyanobacteria. One exemplary acyl-ACP reductase is encoded by orf1594 of Synechococcus elongatus PCC7942 (see SEQ ID NOs:1 and 2 for the polynucleotide and polypeptide sequences, respectively). Another exemplary acyl-ACP reductase is encoded by orfsll0209 of Synechocystis sp. PCC6803 (SEQ ID NOs:3 and 4 for the polynucleotide and polypeptide sequences, respectively). Hence, in certain embodiments, an acyl-ACP reductase comprises or consists of the exemplary polypeptide sequence of SEQ ID NO:2, encoded by orf1594 from Synechococcus elongatus PCC7942, including active variants or fragments thereof. In some embodiments, an acyl-ACP reductase comprises or consists of the exemplary polypeptide sequence of SEQ ID NO:4, encoded by orfsll0209 from Synechocystis sp. PCC6803, including active variants or fragments thereof.

[0277] Introduced or overexpressed acyl-ACP reductases can increase production of a variety of lipids, including fatty acids, triglycerides, alkanes, fatty alcohols, and wax esters. For example, and further to modifications that reduce production and/or storage of glycogen, increased acyl-ACP expression can increase the production of fatty acids, optionally in combination with increased expression of an aldehyde dehydrogenase, and also optionally in combination with reduced expression of an endogenous aldehyde decarbonylase. As another example, increased acyl-ACP expression in combination with DGAT can increase the production of triglycerides, optionally in combination with increased expression of an aldehyde dehydrogenase (to increase fatty acids, a precursor to triglycerides) and/or reduced expression of an endogenous aldehyde aldehyde decarbonylase (to shunt carbon away from other carbon-containing compounds such as alkanes). As a further example, increased acyl-ACP expression in combination with DGAT and an alcohol dehydrogenase can increase production of wax esters, optionally in combination with reduced expression of an aldehyde decarbonylase. As another example, increased increased acyl-ACP expression in combination with increased aldehyde decarbonylase expression can increase production of alkanes, optionally in combination with decreased expression of an alcohol dehydrogenase and/or decreased expression of an aldehyde dehydrogenase (to shunt carbon away from fatty alcohols and fatty acids towards alkanes). Other combinations will be apparent to persons skilled in the art based on the description provided herein.

[0278] Acyl Carrier Proteins.

[0279] Embodiments of the present invention optionally include one or more exogenous (e.g., recombinantly introduced) or overexpressed ACP proteins. These proteins play crucial roles in fatty acid synthesis. Fatty acid synthesis in bacteria, including Cyanobacteria, is carried out by highly conserved enzymes of the type II fatty acid synthase system (FAS II; consisting of about 19 genes) in a sequential, regulated manner. Acyl carrier protein (ACP) plays a central role in this process by carrying all the intermediates as thioesters attached to the terminus of its 4′-phosphopantetheine prosthetic group (ACP-thioesters). Apo-ACP, the product of acp gene, is typically activated by a phosphopantetheinyl transferease (PPT) such as the acyl carrier protein synthase (AcpS) type found in E. coli or the Sfp (surfactin type) PTT as characterized in Bacillus subtilis. Cyanobacteria posses an Sfp-like PPT, which is understood to act in both primary and secondary metabolism. Embodiments of the present invention therefore include overexpression of PPTs such as AcpS and/or Sfp-type PPTs in combination with overexpression of cognate ACP encoding genes, such as ACP.

[0280] The ACP-thioesters are substrates for all of the enzymes of the FAS II system. The end product of fatty acid synthesis is a long acyl chain typically consisting of about 14-18 carbons attached to ACP by a thioester bond.

[0281] At least three enzymes of the FAS II system in other bacteria can be subject to feedback inhibition by acyl-ACPs: 1) the ACCase complex—a heterotetramer of the AccABCD genes that catalyzes the production of malonyl-coA, the first step in the pathway; 2) the product of the FabH gene (β-ketoacyl-ACP synthase III), which catalyzes the condensation of acetyl-CoA with malonyl-ACP; and 3) the product of the FabI gene (enoyl-ACP reductase), which catalyzes the final elongation step in each round of elongation. Certain proteins such as acyl-ACP reductase are capable of increasing fatty acid production in photosynthetic bacteria such as Cyanobacteria, and it is believed that overexpression of ACP in combination with this protein and possibly other biosynthesis proteins will further increases fatty acid production in such strains.

[0282] An ACP can be derived from a variety of eukaryotic organisms, microorganisms (e.g., bacteria, fungi), or plants. In certain embodiments, an ACP polynucleotide sequence and its corresponding polypeptide sequence are derived from Cyanobacteria such as Synechococcus. In certain embodiments, ACPs can be derived from plants such as spinach. SEQ ID NOS:5-12 provide the nucleotide and polypeptide sequences of exemplary bacterial ACPs from Synechococcus and Acinetobacter, and SEQ ID NOS:13-14 provide the same for an exemplary plant ACP from Spinacia oleracea (spinach). SEQ ID NOS:5 and 6 derive from Synechococcus elongatus PCC7942, and SEQ ID NOS:7-12 derive from Acinetobacter sp. ADP1. Thus, in certain embodiments, an acyl carrier protein (ACP) comprises or consists of the exemplary ACP polypeptide sequences include SEQ ID NO:6 from Synechococcus elongatus PCC7942, SEQ ID NOS:8, 10, and 12 from Acinetobacter sp. ADP1, or SEQ ID NO:14 from Spinacia oleracea.

[0283] Examples of prokaryotic microorganisms having an ACP include certain actinomycetes, a group of Gram-positive bacteria with high G+C ratio, such as those from the representative genera Actinomyces, Arthrobacter, Corynebacterium, Frankia, Micrococcus, Mocrimonospora, Mycobacterium, Nocardia, Propionibacterium, Rhodococcus and Streptomyces. Particular examples of actinomycetes that have one or more genes encoding an ACP activity include, for example, Mycobacterium tuberculosis, M. avium, M. smegmatis, Micromonospora echinospora, Rhodococcus opacus, R. ruber, and Streptomyces lividans. Additional examples of prokaryotic microorganisms that encode one or more enzymes having an ACP activity include members of the genera Acinetobacter, such as A. calcoaceticus, A. baumanii, A. baylii, and members of the generua Alcanivorax. In certain embodiments, an ACP gene or enzyme is isolated from Acinetobacter baylii sp. ADP1, a gram-negative triglyceride forming prokaryote.

[0284] Acyl ACP Synthases (Aas).

[0285] Acyl-ACP synthetases (Aas) catalyze the ATP-dependent acylation of the thiol of acyl carrier protein (ACP) with fatty acids, including those fatty acids having chain lengths from about C4 to C18. In Cyanobacteria, among other functions, Aas enzymes not only directly incorporate exogenous fatty acids from the culture medium into other lipids, but also play a role in the recycling of acyl chains from lipid membranes. Deletion of Aas in cyanobacteria can lead to secretion of free fatty acids into the culture medium. See, e.g., Kaczmarzyk and Fulda, Plant Physiology 152:1598-1610, 2010.

[0286] Certain embodiments may overexpress one or more Aas polypeptides described herein and known in the art. According to one non-limiting theory, overexpression of Aas in combination with overexpression of ACP leads to increased TAG production in DGAT-expressing strains, for example, by boosting acyl-ACP levels. Overexpression of Aas in optional combination with overexpression of ACP may likewise increase wax ester formation, for example, when combined with overexpression of one or more alcohol dehydrogenase(s) and wax ester synthase(s), such as a bi-functional DGAT. Certain embodiments therefore include modified photosynthetic microorganisms comprising overexpressed Aas polypeptide(s), optionally in combination with overexpressed ACP polypeptide(s), especially when combined with overexpression of alcohol dehydrogenase, acyl-ACP reductase (e.g., orf1594), and wax ester synthase (e.g., aDGAT).

[0287] Examples of bacterial Aas enzymes include those derived from E. coli, Acinetobacter, and Vibrio sp. such as V. harveyi (see, e.g., Shanklin, Protein Expression and Purification. 18:355-360, 2000; Jiang et al., Biochemistry. 45:10008-10019, 2006). SEQ ID NOS:43 and 44, respectively, provide the nucleotide and polypeptide sequences of an exemplary Aas from Synechococcus elongatus PCC 7942 (0918).

[0288] In specific embodiments, the Aas is derived from the same microorganism as the overexpressed ACP, DGAT, and/or the TES, if any one of these polypeptides is employed in combination with an Aas. Accordingly, certain embodiments include Aas sequences from any of the microorganisms described herein for deriving a DGAT or TES, including, for example, various animals (e.g., mammals, fruit flies, nematodes), plants, parasites, and fungi (e.g., yeast such as S. cerevisiae and Schizosaccharomyces pombe). Examples of prokaryotic microorganisms include certain actinomycetes, a group of Gram-positive bacteria with high G+C ratio, such as those from the representative genera Actinomyces, Arthrobacter, Corynebacterium, Frankia, Micrococcus, Mocrimonospora, Mycobacterium, Nocardia, Propionibacterium, Rhodococcus and Streptomyces. Particular examples of actinomycetes that have one or more genes encoding an Aas activity include, for example, Mycobacterium tuberculosis, M. avium, M. smegmatis, Micromonospora echinospora, Rhodococcus opacus, R. ruber, and Streptomyces lividans. Additional examples of prokaryotic microorganisms that encode one or more enzymes having an Aas activity include members of the genera Acinetobacter, such as A. calcoaceticus, A. baumanii, A. baylii, and members of the generua Alcanivorax. In certain embodiments, an Aas gene or enzyme is isolated from Acinetobacter baylii sp. ADP1, a gram-negative triglyceride forming prokaryote.

[0289] According to one non-limiting theory, an endogenous aldehyde dehydrogenase may be acting on the excess acyl-aldehydes generated by overexpressed orf1594 and converting them to free fatty acids. The normal role of such a dehydrogenase might involve removing or otherwise dealing with damaged lipids. In this scenario, it is then likely that the Aas gene product recycles these free fatty acids by ligating them to ACP. Accordingly, reducing or eliminating expression of the Aas gene product might ultimately increase production of fatty acids, by reducing or preventing their transfer to ACP. Hence, certain aspects include mutations (e.g., genomic) such as point mutations, deletions, and insertions that reduce or eliminate the expression or enzymatic activity of one or more endogenous acyl-ACP synthetases (or synthases). Also included are full or partial deletions of an endogenous gene encoding an Aas protein.

[0290] Phosphatidate Phosphatase (PAP).

[0291] As used herein, a “phosphatidate phosphatase” or “phosphatidic acid phosphatase” gene of the present invention includes any polynucleotide sequence encoding amino acids, such as protein, polypeptide or peptide, obtainable from any cell source, which demonstrates the ability to catalyze the dephosphorylation of phosphatidate (PtdOH) under enzyme reactive conditions, yielding diacylglycerol (DAG) and inorganic phosphate, and further includes any naturally-occurring or non-naturally occurring variants of a phosphatidate phosphatase sequence having such ability.

[0292] Phosphatidate phosphatases (PAP, 3-sn-phosphatidate phosphohydrolase) catalyze the dephosphorylation of phosphatidate (PtdOH), yielding diacylglycerol (DAG) and inorganic phosphate. This enzyme belongs to the family of hydrolases, specifically those acting on phosphoric monoester bonds. The systematic name of this enzyme class is 3-sn-phosphatidate phosphohydrolase. Other names in common use include phosphatic acid phosphatase, acid phosphatidyl phosphatase, and phosphatic acid phosphohydrolase. This enzyme participates in at least 4 metabolic pathways: glycerolipid metabolism, glycerophospholipid metabolism, ether lipid metabolism, and sphingolipid metabolism.

[0293] PAP enzymes have roles in both the synthesis of phospholipids and triacylglycerol through its product diacylglycerol, as well as the generation or degradation of lipid-signaling molecules in eukaryotic cells. PAP enzymes are typically classified as either Mg²⁺-dependent (referred to as PAP1 enzymes) or Mg²⁺-independent (PAP2 or lipid phosphate phosphatase (LPP) enzymes) with respect to their cofactor requirement for catalytic activity. In both yeast and mammalian systems, PAP2 enzymes are known to be involved in lipid signaling. By contrast, PAP1 enzymes, such as those found in Saccharomyces cerevisiae, play a role in de novo lipid synthesis (Han, et al. J Biol Chem. 281:9210-9218, 2006), thereby revealing that the two types of PAP are responsible for different physiological functions.

[0294] In both yeast and higher eukaryotic cells, the PAP reaction is the committed step in the synthesis of the storage lipid triacylglycerol (TAG), which is formed from PtdOH through the intermediate DAG. The reaction product DAG is also used in the synthesis of the membrane phospholipids phosphatidylcholine (PtdCho) and phosphatidylethanolamine. The substrate PtdOH is used for the synthesis of all membrane phospholipids (and the derivative inositol-containing sphingolipids) through the intermediate CDP-DAG. Thus, regulation of PAP activity might govern whether cells make storage lipids and phospholipids through DAG or phospholipids through CDP-DAG. In addition, PAP is involved in the transcriptional regulation of phospholipid synthesis.

[0295] PAP1 enzymes have been purified and characterized from the membrane and cytosolic fractions of yeast, including a gene (Pah1, formerly known as Smp2) been identified to encode a PAP1 enzyme is S. cerevisiae. The Pah1-encoded PAP1 enzyme is found in the cytosolic and membrane fractions of the cell, and its association with the membrane is peripheral in nature. As expected from the multiple forms of PAP1 that have been purified from yeast, pah1Δ mutants still contain PAP1 activity, indicating the presence of an additional gene or genes encoding enzymes having PAP1 activity.

[0296] Analysis of mutants lacking the Pah1-encoded PAP1 has provided evidence that this enzyme generates the DAG used for lipid synthesis. Cells containing the pah1Δ mutation accumulate PtdOH and have reduced amounts of DAG and its acylated derivative TAG. Phospholipid synthesis predominates over the synthesis of TAG in exponentially growing yeast, whereas TAG synthesis predominates over the synthesis of phospholipids in the stationary phase of growth. The effects of the pah1Δ mutation on TAG content are most evident in the stationary phase. For example, stationary phase cells devoid of the Pah1 gene show a reduction of >90% in TAG content. Likewise, the pah1Δ mutation shows the most marked effects on phospholipid composition (e.g. the consequent reduction in PtdCho content) in the exponential phase of growth. The importance of the Pah1-encoded PAP1 enzyme to cell physiology is further emphasized because of its role in the transcriptional regulation of phospholipid synthesis.

[0297] The requirement of Mg²⁺ ions as a cofactor for PAP enzymes is correlated with the catalytic motifs that govern the phosphatase reactions of these enzymes. For example, the Pah1-encoded PAP1 enzyme has a DxDxT (SEQ ID NO:198) catalytic motif within a haloacid dehalogenase (HAD)-like domain (“x” is any amino acid). This motif is found in a superfamily of Mg²⁺-dependent phosphatase enzymes, and its first aspartate residue is responsible for binding the phosphate moiety in the phosphatase reaction. By contrast, the DPP1- and LPP1-encoded PAP2 enzymes contain a three-domain lipid phosphatase motif that is localized to the hydrophilic surface of the membrane. This catalytic motif, which comprises the consensus sequences KxxxxxxRP (domain 1) (SEQ ID NO:116), PSGH (domain 2) (SEQ ID NO:117), and SRxxxxxHxxxD (domain 3) (SEQ ID NO:118), is shared by a superfamily of lipid phosphatases that do not require Mg²⁺ ions for activity. The conserved arginine residue in domain 1 and the conserved histidine residues in domains 2 and 3 may be essential for the catalytic activity of PAP2 enzymes. Accordingly, a phosphatidate phosphatase polypeptide may comprise one or more of the above-described catalytic motifs.

[0298] A polynucleotide encoding a polypeptide having a phosphatidate phosphatase enzymatic activity may be obtained from any organism having a suitable, endogenous phosphatidate phosphatase gene. Examples of organisms that may be used to obtain a phosphatidate phosphatase encoding polynucleotide sequence include, but are not limited to, Homo sapiens, Mus musculus, Rattus norvegicus, Bos taurus, Drosophila melanogaster, Arabidopsis thaliana, Magnaporthe grisea, Saccharomyces cerevisiae, Schizosaccharomyces pombe, Cryptococcus neoformans, and Bacillus pumilus, among others. Specific examples of PAP enzymes include Pah1 from S. cerevisiae, PgpB from E. coli, and PAP from PCC6803.

[0299] In certain embodiments, a phosphatidate phosphatase polypeptide comprises or consists of a polypeptide sequence set forth in SEQ ID NO:131, or a fragment or variant thereof. In particular embodiments, a phosphatidate phosphatase is encoded by a polynucleotide sequence set forth in SEQ ID NO:129 or SEQ ID NO:130, or a fragment or variant thereof. SEQ ID NO:131 is the sequence of Saccharomyces cerevisiae phosphatidate phosphatase (yPah1), and SEQ ID NO:129 is a codon-optimized for expression in Cyanobacteria sequence that encodes yPah1. In certain embodiments, the polypeptide sequence of the PAP is encoded by the E. coli PgpB gene, and/or the PAP gene from Synechocystis sp. PCC6803.

[0300] Thioesterases (TES).

[0301] Certain embodiment include one or more exogenous or overexpressed thioesterase enzymes, optionally in combination with at least one of an introduced ACP enzyme, an introduced Aas enzyme, or both. For instance, one embodiment relates to the use an introduced ACP and/or Aas to increase the growth and/or fatty acid production of a free fatty acid producing TES strain, such as a TesA strain or a FatB strain (i.e., a strain having an introduced TesA or FatB). Thioesterases, as referred to herein, exhibit esterase activity (splitting of an ester into acid and alcohol, in the presence of water) specifically at a thiol group. Fatty acids are often attached to cofactor molecules, such as coenzyme A (CoA) and acyl carrier protein (ACP), by thioester linkages during the process of de novo fatty acid synthesis. Certain embodiments employ thioesterases having acyl-ACP thioesterase activity, acyl-CoA thioesterase activity, or both activities. Examples of thioesterases having both activities (i.e., acyl-ACP/acyl-CoA thioesterases) include TesA and related embodiments. In certain embodiments, a selected thioesterase has acyl-ACP thioesterase activity but not acyl-CoA thioesterase activity. Examples of thioesterases having only acyl-ACP thioesterase activity include the FatB thioesterases and related embodiments.

[0302] Certain thioesterases have both thioesterase activity and lysophospholipase activity. Specific examples of thioesterases include TesA, TesB, and related embodiments. Certain embodiments may employ periplasmically-localized or cytoplasmically-localized enzymes that thioesterase activity, such as E. coli TesA or E. coli TesB. For instance, wild-type TesA, being localized to the periplasm, is normally used to hydrolyze thioester linkages of fatty acid-ACP (acyl-ACP) or fatty acid-CoA (acyl-CoA) compounds scavenged from the environment. A mutant thioesterase, PldC (referred to interchangeably as PldC/*TesA or *TesA), is not exported to the periplasm due to deletion of an N-terminal amino acid sequence required for proper transport of TesA from the cytoplasm to the periplasm. This deletion results in a cytoplasmic-localized PldC(*TesA) protein that has access to endogenous acyl-ACP and acyl-CoA intermediates. Other mutations or deletions in the N-terminal region of TesA can be used to achieve the same result, i.e., a cytoplasmic TesA.

[0303] Overexpressed PldC(*TesA) results in hydrolysis of acyl groups from endogenous acyl-ACP and acyl-CoA molecules. Cells expressing PldC(*TesA) must channel additional cellular carbon and energy to maintain production of acyl-ACP and acyl-coA molecules, which are required for membrane lipid synthesis. Thus, PldC(*TesA) expression results in a net increase in total cellular lipid content. For instance, PldC(*TesA) expressed alone in Synechococcus doubles the total lipid content from 10% of biomass to 20% of biomass, a result that can be further increased by combining *TesA or related molecules with an introduced ACP and/or an introduced Aas. Hence, certain embodiments employ an exogenous or overexpressed cytoplasmic TesA (such as *TesA) in combination with an exogenous or overexpressed ACP, an exogenous or overexpressed Aas, or both.

[0304] Certain thioesterases have thioesterase activity only, i.e., they have little or no lysophospholipase activity. Examples of these thioesterases include enzymes of the FatB family. FatB encoded enzymes typically hydrolyze saturated C14-C18 ACPs, preferentially 16:0 ACP, but they can also hydrolyze 18:1 ACP. The production of medium chain (C8-C12) fatty acids in plants or seeds such as those of Cuphea spp. often results of FatB enzymes that have chain length specificities for medium chain fatty acyl-ACPs. These medium chain FatB thioesterases are present in many species with medium-chain fatty acids in their oil, including, for example, California bay laurel, coconut, and elm, among others. Hence, FatB sequences may be derived from these and other organisms. Particular examples include plant FatB acyl-ACP thioesterases such as C8, C12, C14, and C16 FatB thioesterases.

[0305] In certain embodiments, the TES is a FatB polypeptide, such as a C8, C12, C14, C16, or C18 FatB. Specific examples of FatB thioesterases include the Cuphea hookeriana C8/C10 FatB thioesterase, the Umbellularia californica C12 FatB1 thioesterase, the Cinnamomum camphora C14 FatB1 thioesterase, and the Cuphea hookeriana C16 FatB1 thioesterase. In specific embodiments, the thioesterase is a Cuphea hookeriana C8/C10 FatB, comprising the amino acid sequence of SEQ ID NO:108 (full-length protein) or SEQ ID NO:109 (mature protein without signal sequence). In particular embodiments, the thioesterase is a Umbellularia californica C12 FatB1, comprising the amino acid sequence of SEQ ID NO:110 (full-length protein) or SEQ ID NO:111 (mature protein without signal sequence). In certain embodiments, the thioesterase is a Cinnamomum camphora C14 FatB1, comprising the amino acid sequence of SEQ ID NO:112 (full-length protein) or SEQ ID NO:113 (mature protein without signal sequence). In particular embodiments, the thioesterase is a Cuphea hookeriana C16 FatB1, comprising the amino acid sequence of SEQ ID NO:114 (full-length protein) or SEQ ID NO:115 (mature protein without signal sequence), or a fragment or variant thereof.

[0306] Lipases and Phospholipases.

[0307] In various embodiments, modified photosynthetic microorganisms, e.g., Cyanobacteria, of the present invention further comprise one or more exogenous or introduced nucleic acids that encode a polypeptide having a lipase or phospholipase activity, or a fragment or variant thereof. Lipases, including phospholipases, lysophospholipases, thioesterases, and enzymes having one, two, or all three of these activities, typically catalyze the hydrolysis of ester chemical bonds in lipid substrates. Without wishing to be bound by any one theory, in certain exemplary embodiments the expression of one or more phospholipases can generate fatty acids from membrane lipids, which may then be used by the ACP and/or Aas to make acyl-ACPs. These acyl-ACPs, for example, can then feed into the triglyceride synthesis pathways, thereby increasing triglyceride (TAG) production.

[0308] A phospholipase is an enzyme that hydrolyzes phospholipids into fatty acids and other lipophilic substances. There are four major classes, termed A, B, C and D distinguished by what type of reaction they catalyze. Phospholipase A1 cleaves the SN-1 acyl chain, while Phospholipase A2 cleaves the SN-2 acyl chain, releasing arachidonic acid. Phospholipase B cleaves both SN-1 and SN-2 acyl chains, and is also known as a lysophospholipase. Phospholipase C cleaves before the phosphate, releasing diacylglycerol and a phosphate-containing head group. Phospholipases C play a central role in signal transduction, releasing the second messenger, inositol triphosphate. Phospholipase D cleaves after the phosphate, releasing phosphatidic acid and an alcohol. Types C and D are considered phosphodiesterases. In various embodiments of the present invention, one or more phospholipase from any one of these classes may be used, alone or in any combination.

[0309] As noted above, phospholipases (PLA1,2) act on phospholipids of different kinds including phosphatidyl glycerol, the major phospholipid in Cyanobacteria, by cleaving the acyl chains off the sn1 or sn2 positions (carbon 1 or 2 on the glycerol backbone); some are selective for sn1 or sn2, others act on both. Lysophospholipases act on lysophospholipids, which can be the product of phospholipases or on lysophosphatidic acid, a normal intermediate of the de novo phosphatidic acid synthesis pathway, e.g., 1-acyl-DAG-3-phosphate.

[0310] Merely by way of non-limiting theory, it is understood that in certain embodiments, phospholipases and/or lysophospholipases can cleave off acyl chains from phospholipids or lysophospholipids and thus deregulate the normal recycling of the lipid membranes, including both cell membrane and thylakoid membranes, which then leads to accumulation of free fatty acids (FFAs). In certain embodiments (e.g., TesA strains), these FFAs may accumulate extracellularly. In other embodiments (e.g., ACP and/or Aas over-expressing microorganisms), FFAs can be converted into acyl-ACPs by acyl ACP synthase (Aas) in a strain that also over-expresses ACP. In specific embodiments (e.g., DGAT-containing microorganisms), these acyl-ACPs can then serve as substrates for DGAT to make TAGs.

[0311] In other embodiments, phospholipases can be over-expressed to generate lyshophospholipids and acyl chains. The lysophospholipids can then serve as substrates for a lysophospholipase, which cleaves off the remaining acyl chain. In some embodiments, these acyl chains can either accumulate as FFAs, or in other embodiments may serve as substrates of Acyl ACP synthase (Aas) to generate acyl-ACPs, which can then be used by DGAT to make TAGs.

[0312] Particular examples of phospholipase C enzymes include those derived from eukaryotes such as mammals and parasites, in addition to those derived from bacteria. Examples include phosphoinositide phospholipase C (EC 3.1.4.11), the main form found in eukaryotes, especially mammals, the zinc-dependent phospholipase C family of bacterial enzymes (EC 3.1.4.3) that includes alpha toxins, phosphatidylinositol diacylglycerol-lyase (EC 4.6.1.13), a related bacterial enzyme, and glycosylphosphatidylinositol diacylglycerol-lyase (EC 4.6.1.14), a trypanosomal enzyme.

[0313] In particular embodiments, the present invention contemplates using a lysophospholipase. A lysophospholipase is an enzyme that catalyzes the chemical reaction:

2-lysophosphatidic acid+H₂O [symbol] glycerol-3-phosphate+a carboxylate

Thus, the two substrates of this enzyme are 2-lysophosphatidylcholine and H₂O, whereas its two products are glycerophosphocholine and carboxylate.

[0314] Lysophospholipase are members of the hydrolase family, specifically those acting on carboxylic ester bonds. Lysophospholipases participate in glycerophospholipid metabolism. Examples of lysophospholipases include, but are not limited to, 2-Lysophosphatidylcholine acylhydrolase, Lecithinase B, Lysolecithinase, Phospholipase B, Lysophosphatidase, Lecitholipase, Phosphatidase B, Lysophosphatidylcholine hydrolase, Lysophospholipase A1, Lysophospholipase L1 (TesA), Lysophopholipase L2, TesB, Lysophospholipase transacylase, Neuropathy target esterase, NTE, NTE-LysoPLA, NTE-lysophospholipase, and Vu Patatin 1 protein. In particular embodiments, lysophospholipases utilized according to the present invention are derived from a bacteria, e.g., E. coli, or a plant. Any of these lysophospholipases may be used according to various embodiments of the present invention.

[0315] Certain lysophospholipases, such as Lysophospholipase L1 (also referred to as PldC or TesA) are periplasmically-localized or cytoplasmically-localized enzymes that have both lysophospholipase and thioesterase activity, as described above. Hence, certain thioesterases such as TesA can also be characterized as lysophospholipases. A mutant lysophospholipase described herein, PldC(*TesA), is not exported to the periplasm due to deletion of an N-terminal amino acid sequence required for proper transport of TesA from the cytoplasm to the periplasm. This results in a cytoplasmic-localized PldC(*TesA) protein that has access to endogenous acyl-ACP and acyl-CoA intermediates. Overexpressed PldC(*TesA) results in hydrolysis of acyl groups from endogenous acyl-ACP and acyl-CoA molecules. Cells expressing PldC(*TesA) must channel additional cellular carbon and energy to maintain production of acyl-ACP and acyl-coA molecules, which are required for membrane lipid synthesis. Thus, PldC(*TesA) expression results in a net increase in cellular lipid content. As described herein, PldC(*TesA) is expressed in Synechococcus lipid content doubles from 10% of biomass to 20% of biomass.

[0316] In certain embodiments of the present invention, lysophospholipases utilized according to the present invention have both phospholipase and thioesterase activities. Examples of lysophospholipases that have both activities include, e.g., Lysophospholipase L1 (TesA), such as E. coli Lysophospholipase L1, as well as fragments and variants thereof, including those described in the paragraph above. As a phospholipase, certain embodiments may employ TesA variants having only lysophospholipase activity, including variants with reduced or no thioesterase activity.

[0317] Additional non-limiting examples of phospholipases include phospholipase A1 (PldA) from Acinetobacter sp. ADP1, phospholipase A (PldA) from E. coli, phospholipase from Streptomyces coelicolorA3(2), phospholipase A2 (PLA2-α) from Arabidopsis thaliana; phospholipase A1/triacylglycerol lipase (DAD1; Defective Anther Dehiscence 1) from Arabidopsis thaliana, chloroplast DONGLE from Arabidopsis thaliana, patatin-like protein from Arabidopsis thaliana, and patatin from Anabaena variabilis ATCC 29413. Additional non-limiting examples of lysophospholipases include phospholipase B (Plb1p) from Saccharomyces cerevisiae S288c, phospholipase B (Plb2p) from Saccharomyces cerevisiae S288c, ACIAD1057 (tesA homolog) from Acinetobacter ADP1, ACIAD1943 lysophospholipase from Acinetobacter ADP1, and a lysophospholipase (YP_{—}702320; RHA1_ro02357) from Rhodococcus.

[0318] In particular embodiments, the encoded phospholipase comprises or consists of a Lysophospholipase L1 (TesA), Lysophospholipase L2, TesB, or Vu patatin 1 protein, or a homolog, fragment, or variant thereof. In certain embodiments, the Lysophospholipase L1 (TesA), Lysophospholipase L2, or TesB is a bacterial Lysophospholipase L1 (TesA), Lysophospholipase L2, or TesB, such as an E. coli Lysophospholipase L1 (TesA) having the wild-type sequence set forth in SEQ ID NO:133, an E. coli Lysophospholipase L2 having the wild-type sequence set forth in SEQ ID NO:137, or an E. coli TesB having the wild-type sequence set forth in SEQ ID NO:134. In particular embodiment, the Vu patatin 1 protein has the wild-type sequence set forth in SEQ ID NO:138.

[0319] In particular embodiments, the phospholipase is modified such that it localizes predominantly to the cytoplasm instead of the periplasm. For example, the phospholipase may have a deletion or mutation in a region associated with periplasmic localization. In particular embodiments, the phospholipase variant is derived from Lysophospholipase L1 (TesA) or TesB. In certain embodiments, the Lysophospholipase L1 (TesA) or TesB variant is a bacterial Lysophospholipase L1 (TesA) or TesB variant, such as a cytoplasmic E. coli Lysophospholipase L1 (PldC(*TesA)) variant having the sequence set forth in SEQ ID NO:121.

[0320] Additional examples of phospholipase polypeptide sequences include phospholipase A1 (PldA) from Acinetobacter sp. ADP1 (SEQ ID NO:157), phospholipase A (PldA) from E. coli (SEQ ID NO:158), phospholipase from Streptomyces coelicolor A3(2) (SEQ ID NO:159), phospholipase A2 (PLA2-α) from Arabidopsis thaliana (SEQ ID NO:160). phospholipase A1/triacylglycerol lipase (DAD1; Defective Anther Dehiscence 1) from Arabidopsis thaliana (SEQ ID NO:161), chloroplast DONGLE from Arabidopsis thaliana (SEQ ID NO:162), patatin-like protein from Arabidopsis thaliana (SEQ ID NO:163), and patatin from Anabaena variabilis ATCC 29413 (SEQ ID NO:164). Additional non-limiting examples of lysophospholipase polypeptide sequences include phospholipase B (Plb1p) from Saccharomyces cerevisiae S288c (SEQ ID NO:165), phospholipase B (Plb2p) from Saccharomyces cerevisiae S288c (SEQ ID NO:166), ACIAD1057 (TesA homolog) from Acinetobacter ADP1 (SEQ ID NO:167), ACIAD1943 lysophospholipase from Acinetobacter ADP1 (SEQ ID NO:168), and a lysophospholipase (YP_{—}702320; RHA1_ro02357) from Rhodococcus (SEQ ID NO:169).

[0321] Triacvlglycerol (TAG) Hydrolases.

[0322] Certain embodiments relate to the use of exogenous or overexpressed TAG hydrolases (or TAG lipases) to increase production of TAGs in a TAG-producing strain. For instance, specific embodiments may utilize a TAG hydrolase in combination with a DGAT, and optionally a TES. These embodiments may then further utilize an ACP, an Aas, or both, any of the lipid biosynthesis proteins described herein, and/or any of the modifications to glycogen production and storage described herein. Hence, as noted above, TAG hydrolases may be used in TAG-producing strains (e.g., DGAT-expressing strains) with or without an ACP or Aas.

[0323] TAG hydrolases are carboxylesterases that are typically specific for insoluble long chain fatty acid TAGs. Carboxylesterases catalyze the chemical reaction:

carboxylic ester+H₂O [symbol] alcohol+carboxylate

[0324] Thus, the two substrates of this enzyme are carboxylic ester and H₂O, whereas its two products are alcohol and carboxylate. According to one non-limiting theory, it is understood that TAG hydrolase expression (or overexpression) in a TAG producing strain (e.g., DGAT/ACP, DGAT/Aas, DGAT/ACP/Aas) releases acyl chains to not only increase accumulation of free fatty acids (FFA), but also increase the amount of free 1,2 diacylglycerol (DAG). This free DAG then serves as a substrate for DGAT, and thereby allows increased TAG production, especially in the presence of over-expressed ACP, Aas, or both. Accordingly, certain embodiments employing a TAG hydrolase produce increased amounts of TAG, relative, for example, to a DGAT only-expressing microorganism. In specific embodiments, the TAG hydrolase is specific for TAG and not DAG, i.e., it preferentially acts on TAG relative to DAG.

[0325] Non-limiting examples of TAG hydrolases include SDP1 (SUGAR-DEPENDENT1) triacylglycerol lipase from Arabidopsis thaliana (SEQ ID NO:170), ACIAD1335 from Acinetobacter sp. ADP1 (SEQ ID NO:171), TG14P from S. cerevisiae (SEQ ID NO:172), and RHA1_ro04722 (YP_{—}704665) TAG lipase from Rhodococcus (SEQ ID NO:173). Additional putative lipases/esterases from Rhodococcus include RHA1_ro01602 lipase/esterase (see SEQ ID NOs:156 and 174 for polynucleotide and polypeptide sequence, respectively), and RHA1_ro06856 lipase/esterase (see SEQ ID NOs:119 and 120 for polynucleotide and polypeptide sequence, respectively).

[0326] Acetyl CoA Carboxylases (ACCase).

[0327] Embodiments of the present invention optionally include one or more exogenous (e.g., recombinantly introduced) or overexpressed ACCase proteins. As used herein, an “acetyl CoA carboxylase” gene of the present invention includes any polynucleotide sequence encoding amino acids, such as protein, polypeptide or peptide, obtainable from any cell source, which demonstrates the ability to catalyze the carboxylation of acetyl-CoA to produce malonyl-CoA under enzyme reactive conditions, and further includes any naturally-occurring or non-naturally occurring variants of an acetyl-CoA carboxylase sequence having such ability.

[0328] Acetyl-CoA carboxylase (ACCase) is a biotin-dependent enzyme that catalyses the irreversible carboxylation of acetyl-CoA to produce malonyl-CoA through its two catalytic activities, biotin carboxylase (BC) and carboxyltransferase (CT). The biotin carboxylase (BC) domain catalyzes the first step of the reaction: the carboxylation of the biotin prosthetic group that is covalently linked to the biotin carboxyl carrier protein (BCCP) domain. In the second step of the reaction, the carboxyltransferase (CT) domain catalyzes the transfer of the carboxyl group from (carboxy) biotin to acetyl-CoA. Formation of malonyl-CoA by acetyl-CoA carboxylase (ACCase) represents the commitment step for fatty acid synthesis, because malonyl-CoA has no metabolic role other than serving as a precursor to fatty acids. Because of this reason, acetyl-CoA carboxylase represents a pivotal enzyme in the synthesis of fatty acids.

[0329] In most prokaryotes, ACCase is a multi-subunit enzyme, whereas in most eukaryotes it is a large, multi-domain enzyme. In yeast, the crystal structure of the CT domain of yeast ACCase has been determined at 2.7 A resolution (Zhang et al., Science, 299:2064-2067 (2003). This structure contains two domains, which share the same backbone fold. This fold belongs to the crotonase/ClpP family of proteins, with a b-b-a superhelix. The CT domain contains many insertions on its surface, which are important for the dimerization of ACCase. The active site of the enzyme is located at the dimer interface.

[0330] Although Cyanobacteria, such as Synechococcus, express a native ACCase enzyme, these bacteria typically do not produce or accumulate significant amounts of fatty acids. For example, Synechococcus in the wild accumulates fatty acids in the form of lipid membranes to a total of about 4% by dry weight.

[0331] Given the role of ACCase in the commitment step of fatty acid biosynthesis, embodiments of the present invention include methods of increasing the production of fatty acid biosynthesis, and, thus, lipid production, in Cyanobacteria by introducing one or more polynucleotides that encode an ACCase enzyme that is exogenous to the Cyanobacterium's native genome. Embodiments of the present invention also include a modified Cyanobacterium, and compositions comprising said Cyanobacterium, comprising one or more polynucleotides that encode an ACCase enzyme that is exogenous to the Cyanobacterium's native genome.

[0332] A polynucleotide encoding an ACCase enzyme may be isolated or obtained from any organism, such as any prokaryotic or eukaryotic organism that contains an endogenous ACCase gene. Examples of eukaryotic organisms having an ACCase gene are well-known in the art, and include various animals (e.g., mammals, fruit flies, nematodes), plants, parasites, and fungi (e.g., yeast such as S. cerevisiae and Schizosaccharomyces pombe). In certain embodiments, the ACCase encoding polynucleotide sequences are obtained from Synechococcus sp. PCC7002.

[0333] Examples of prokaryotic organisms that may be utilized to obtain a polynucleotide encoding an enzyme having ACCase activity include, but are not limited to, Escherichia coli, Legionella pneumophila, Listeria monocytogenes, Streptococcus pneumoniae, Bacillus subtilis, Ruminococcus obeum ATCC 29174, marine gamma proteobacterium HTCC2080, Roseovarius sp. HTCC2601, Oceanicola granulosus HTCC2516, Bacteroides caccae ATCC 43185, Vibrio alginolyticus 12G01, Pseudoalteromonas tunicata D2, Marinobacter sp. ELB17, marine gamma proteobacterium HTCC2143, Roseobacter sp. SK209-2-6, Oceanicola batsensis HTCC2597, Rhizobium leguminosarum bv. trifolii WSM1325, Nitrobacter sp. Nb-311A, Chloroflexus aggregans DSM 9485, Chlorobaculum parvum, Chloroherpeton thalassium, Acinetobacter baumannii, Geobacillus, and Stenotrophomonas maltophilia, among others.

[0334] In certain embodiments, an acetyl-CoA carboxylase (ACCase) polypeptide comprises or consists of a polypeptide sequence set forth in any of SEQ ID NOs:55, 45, 46, 47, 48 or 49, or a fragment or variant thereof. In particular embodiments, an ACCase polypeptide is encoded by a polynucleotide sequence set forth in any of SEQ ID NOs:56, 57, 50, 51, 52, 53 or 54, or a fragment or variant thereof. SEQ ID NO:55 is the sequence of Saccharomyces cerevisiae acetyl-CoA carboxylase (yAcc1); and SEQ ID NO:56 is a codon-optimized for expression in Cyanobacteria sequence that encodes yAcc1. SEQ ID NO:45 is Synechococcus sp. PCC 7002 AccA; SEQ ID NO:46 is Synechococcus sp. PCC 7002 AccB; SEQ ID NO:47 is Synechococcus sp. PCC 7002 AccC; and SEQ ID NO:48 is Synechococcus sp. PCC 7002 AccD. SEQ ID NO:50 encodes Synechococcus sp. PCC 7002 AccA; SEQ ID NO:51 encodes Synechococcus sp. PCC 7002 AccB; SEQ ID NO:52 encodes Synechococcus sp. PCC 7002 AccC; and SEQ ID NO:53 encodes Synechococcus sp. PCC 7002 AccD. SEQ ID NO:49 is a T. aestivum ACCase; and SEQ ID NO:54 encodes this Triticum aestivum ACCase.

[0335] Diacylglycerol Acyltransferases (DGAT).

[0336] As used herein, a “diacylglycerol acyltransferase” (DGAT) gene of the present invention includes any polynucleotide sequence encoding amino acids, such as protein, polypeptide or peptide, obtainable from any cell source, which demonstrates the ability to catalyze the production of triacylglycerol from 1,2-diacylglycerol and fatty acyl substrates under enzyme reactive conditions, in addition to any naturally-occurring (e.g., allelic variants, orthologs) or non-naturally occurring variants of a diacylglycerol acyltransferase sequence having such ability. DGAT genes of the present invention also include polynucleotide sequences that encode bi-functional proteins, such as those bi-functional proteins that exhibit a DGAT activity as well as a CoA:fatty alcohol acyltransferase activity, e.g., a wax ester synthesis (WS) activity, as often found in many TAG producing bacteria.

[0337] Diacylglycerol acyltransferases (DGATs) are members of the O-acyltransferase superfamily, which esterify either sterols or diacyglycerols in an oleoyl-CoA-dependent manner. DGAT in particular esterifies diacylglycerols, which reaction represents the final enzymatic step in the production of triacylglycerols in plants, fungi and mammals. Specifically, DGAT is responsible for transferring an acyl group from acyl-coenzyme-A to the sn-3 position of 1,2-diacylglycerol (DAG) to form triacylglycerol (TAG). DGAT is an integral membrane protein that has been generally described in Harwood (Biochem. Biophysics. Acta, 1301:7-56, 1996), Daum et al. (Yeast 16:1471-1510, 1998), and Coleman et al. (Annu. Rev. Nutr. 20:77-103, 2000) (each of which are herein incorporated by reference).

[0338] In plants and fungi, DGAT is associated with the membrane and lipid body fractions. In catalyzing TAGs, DGAT contributes mainly to the storage of carbon used as energy reserves. In animals, however, the role of DGAT is more complex. DGAT not only plays a role in lipoprotein assembly and the regulation of plasma triacylglycerol concentration (Bell, R. M., et al.), but participates as well in the regulation of diacylglycerol levels (Brindley, Biochemistry of Lipids, Lipoproteins and Membranes, eds. Vance, D. E. & Vance, J. E. (Elsevier, Amsterdam), 171-203; and Nishizuka, Science 258:607-614 (1992) (each of which are herein incorporated by reference)).

[0339] In eukaryotes, at least three independent DGAT gene families (DGAT1, DGAT2, and PDAT) have been described that encode proteins with the capacity to form TAG. Yeast contain all three of DGAT1, DGAT2, and PDAT, but the expression levels of these gene families varies during different phases of the life cycle (Dahlqvst, A., et al. Proc. Natl. Acad. Sci. USA 97:6487-6492 (2000) (herein incorporated by reference).

[0340] In prokaryotes, WS/DGAT from Acinetobacter calcoaceticus ADP1 represents the first identified member of a widespread class of bacterial wax ester and TAG biosynthesis enzymes. This enzyme comprises a putative membrane-spanning region but shows no sequence homology to the DGAT1 and DGAT2 families from eukaryotes. Under in vitro conditions, WS/DGAT shows a broad capability of utilizing a large variety of fatty alcohols, and even thiols as acceptors of the acyl moieties of various acyl-CoA thioesters. WS/DGAT acyltransferase enzymes exhibit extraordinarily broad substrate specificity. Genes for homologous acyltransferases have been found in almost all bacteria capable of accumulating neutral lipids, including, for example, Acinetobacter baylii, A. baumanii, and M. avium, and M. tuberculosis CDC1551, in which about 15 functional homologues are present (see, e.g., Daniel et al., J. Bacteriol. 186:5017-5030, 2004; and Kalscheuer et al., J. Biol. Chem. 287:8075-8082, 2003).

[0341] DGAT proteins may utilize a variety of acyl substrates in a host cell, including fatty acyl-CoA and fatty acyl-ACP molecules. In addition, the acyl substrates acted upon by DGAT enzymes may have varying carbon chain lengths and degrees of saturation, although DGAT may demonstrate preferential activity towards certain molecules.

[0342] Like other members of the eukaryotic O-acyltransferase superfamily, eukaryotic DGAT polypeptides typically contain a FYxDWWN (SEQ ID NO:15) heptapeptide retention motif, as well as a histidine (or tyrosine)-serine-phenylalanine (H/YSF) tripeptide motif, as described in Zhongmin et al. (Journal of Lipid Research, 42:1282-1291, 2001) (herein incorporated by reference). The highly conserved FYxDWWN (SEQ ID NO:15) is believed to be involved in fatty Acyl-CoA binding.

[0343] DGAT enzymes utilized according to the present invention may be isolated from any organism, including eukaryotic and prokaryotic organisms. Eukaryotic organisms having a DGAT gene are well-known in the art, and include various animals (e.g., mammals, fruit flies, nematodes), plants, parasites, and fungi (e.g., yeast such as S. cerevisiae and Schizosaccharomyces pombe). Examples of prokaryotic organisms include certain actinomycetes, a group of Gram-positive bacteria with high G+C ratio, such as those from the representative genera Actinomyces, Arthrobacter, Corynebacterium, Frankia, Micrococcus, Mocrimonospora, Mycobacterium, Nocardia, Propionibacterium, Rhodococcus and Streptomyces. Particular examples of actinomycetes that have one or more genes encoding a DGAT activity include, for example, Mycobacterium tuberculosis, M. avium, M. smegmatis, Micromonospora echinospora, Rhodococcus opacus, R. ruber, and Streptomyces lividans. Additional examples of prokaryotic organisms that encode one or more enzymes having a DGAT activity include members of the genera Acinetobacter, such as A. calcoaceticus, A. baumanii, A. baylii, and members of the generua Alcanivorax. In certain embodiments, a DGAT gene or enzyme is isolated from Acinetobacter baylii sp. ADP1, a gram-negative triglyceride forming prokaryote, which contains a well-characterized DGAT (AtfA).

[0344] In certain embodiments, the modified photosynthetic microorganisms of the present invention may comprise two or more polynucleotides that encode DGAT or a variant or fragment thereof. In particular embodiments, the two or more polynucleotides are identical or express the same DGAT. In certain embodiments, these two or more polynucleotides may be different or may encode two different DGAT polypeptides. For example, in one embodiment, one of the polynucleotides may encode ADGATd, while another polynucleotide may encode ScoDGAT. In particular embodiments, the following DGATs are coexpressed in modified photosynthetic microorganisms, e.g., Cyanobacteria, using one of the following double DGAT strains: ADGATd(NS1)::ADGATd(NS2); ADGATn(NS1)::ADGATn(NS2); ADGATn(NS1)::SDGAT(NS2); SDGAT(NS1)::ADGATn(NS2); SDGAT(NS1)::SDGAT(NS2). For the NS1 vector, pAM2291, EcoRI follows ATG and is part of the open reading frame (ORF). For the NS2 vector, pAM1579, EcoRI follows ATG and is part of the ORF. A DGAT having EcoRI nucleotides following ATG may be cloned in either pAM2291 or pAM1579; such a DGAT is referred to as ADGATd. Other embodiments utilize the vector, pAM2314FTrc3, which is an NS1 vector with Nde/BgIII sites, or the vector, pAM1579FTrc3, which is the NS2 vector with Nde/BgIII sites. A DGAT without EcoRI nucleotides may be cloned into either of these last two vectors. Such a DGAT is referred to as ADGATn. Modified photosynthetic microorganisms expressing different DGATs express TAGs having different fatty acid compositions. Accordingly, certain embodiments of the present invention contemplate expressing two or more different DGATs, in order to produce TAGs having varied fatty acid compositions.

[0345] In certain embodiments, a DGAT polypeptide comprises or consists of a polypeptide sequence set forth in any one of SEQ ID NOs:58, 59, 60 Or 61, or a fragment or variant thereof. SEQ ID NO:58 is the sequence of DGATn; SEQ ID NO:59 is the sequence of Streptomyces coelicolor DGAT (ScoDGAT or SDGAT); SEQ ID NO:60 is the sequence of Alcanivorax borkumensis DGAT (AboDGAT); and SEQ ID NO:61 is the sequence of DGATd. In certain embodiments of the present invention, a DGAT polypeptide is encoded by a polynucleotide sequence set forth in any one of SEQ ID NOs:62, 63, 64, 65 or 66, or a fragment or variant thereof. SEQ ID NO:62 is a codon-optimized for expression in Cyanobacteria sequence that encodes DGATn; SEQ ID NO:63 has homology to SEQ ID NO:62; SEQ ID NO:64 is a codon-optimized for expression in Cyanobacteria sequence that encodes ScoDGAT; SEQ ID NO:65 is a codon-optimized for expression in Cyanobacteria sequence that encodes AboDGAT; and SEQ ID NO:66 is a codon-optimized for expression in Cyanobacteria sequence that encodes DGATd.

[0346] Fatty Acyl-CoA Synthetases.

[0347] Certain embodiments relate to the use of overexpressed fatty acyl-CoA synthetases to increase activation of fatty acids, and thereby increase production of TAGs in a TAG-producing strain (e.g., a DGAT-expressing strain). For instance, specific embodiments may utilize an acyl-ACP reductase in combination with a fatty acyl-CoA synthetase and a DGAT. These embodiments may then further utilize an ACP, an ACCase, or both, and/or any of the modifications to glycogen production and storage or glycogen breakdown described herein.

[0348] Fatty acyl-CoA synthetases activate fatty acids for metabolism by catalyzing the formation of fatty acyl-CoA thioesters. Fatty acyl-CoA thioesters can then serve not only as substrates for beta-oxidation, at least in bacteria capable of growing on fatty acids as a sole source of carbon (e.g., E. coli, Salmonella), but also as acyl donors in phospholipid biosynthesis. Many fatty acyl-CoA synthetases are characterized by two highly conserved sequence elements, an ATP/AMP binding motif, which is common to enzymes that form an adenylated intermediate, and a fatty acid binding motif.

[0349] According to one non-limiting theory, certain embodiments may employ fatty acyl-CoA synthetases to increase activation of free fatty acids, which can then be incorporated into TAGs, mainly by the DGAT-expressing (and thus TAG-producing) photosynthetic microorganisms described herein. Hence, fatty acyl-CoA synthetases can be used in any of the embodiments described herein, such as those that produce increased levels of free fatty acids, where it is desirable to turn free fatty acids into TAGs. As noted above, these free fatty acids can then be activated by fatty acyl-CoA synthetases to generate acyl-CoA thioesters, which can then serve as substrates by DGAT to produce increased levels of TAGs.

[0350] One exemplary fatty acyl-CoA synthetase includes the FadD gene from E. coli (SEQ ID NOS:16 and 17 for nucleotide and polypeptide sequence, respectively), which encodes a fatty acyl-CoA synthetase having substrate specificity for medium and long chain fatty acids. Other exemplary fatty acyl-CoA synthetases include those derived from S. cerevisiae; Faa1p can use C12-C16 acyl-chains in vitro (see SEQ ID NOS:18 and 19 for nucleotide and polypeptide sequence, respectively), Faa2p shows a less restricted specificity ranging from C7-C17 (see SEQ ID NOS:20 and 21 for nucleotide and polypeptide sequence, respectively), and Faa3p, together with that of DGAT1, enhances lipid accumulation in the presence of exogenous fatty acids is S. cerevisiae (see SEQ ID NO:22 and 23 for nucleotide and polypeptide sequence, respectively). SEQ ID NO:22 is codon-optimized for expression in S. elongatus PCC7942. Hence, certain embodiments include fatty acyl-CoA synthetase polypeptides that comprises or consist of the Faa1p polypeptide sequence set forth in SEQ ID NO:19, the Faa2p polypeptide sequence set forth in SEQ ID NO:21, and/or the Faa3p polypeptide sequence set forth in SEQ ID NO:23, including active variants/fragments thereof.

[0351] Alcohol Dehydrogenases.

[0352] Embodiments of the present invention optionally include one or more introduced or expressed (e.g., overexpressed) alcohol dehydrogenases. Examples of alcohol dehydrogenases include those capable of using acyl or fatty aldehydes (e.g., one or more of nonyl-aldehyde, C₁₂, C₁₄, C₁₆, C₁₈, C₂₀ fatty aldehyde) as a substrate, and converting them into fatty alcohols. Specific examples include long-chain alcohol dehydrogenases, capable of using long-chain aldehydes (e.g., C₁₆, C₁₈, C₂₀) as substrates. In certain embodiments, the alcohol dehydrogenase is naturally-occurring or endogenous to the modified microorganism, and is sufficient to convert increased acyl aldehydes (produced by acyl-ACP reductase) into fatty alcohols, and thereby contribute to increased wax ester production and overall satisfactory growth characteristics. In certain embodiments, the alcohol dehydrogenase is derived from a microorganism that differs from the one being modified.

[0353] In these and related embodiments, expression or overexpression of an alcohol dehydrogenase may increase shunting of acyl aldehydes towards production of fatty alcohols, and away from production of other products such as alkanes, fatty acids, or triglycerides. When combined with one or more wax ester synthases, such as DGAT or other enzyme having wax ester synthase activity (e.g., the ability to convert fatty alcohols into wax esters), alcohol dehydrogenases may contribute to production of wax esters, optionally in combination with an overexpressed or introduced acyl-ACP reductase. They may also reduce accumulation of potentially toxic acyl aldehydes, and thereby improve growth characteristics of a modified microorganism.

[0354] Non-limiting examples of alcohol dehydrogenases include those encoded by slr1192 of Synechocystis sp. PCC6803 (SEQ ID NOS:104-105) and ACIAD3612 of Acinetobacter baylyi (SEQ ID NOS:106-107). Also included are homologs or paralogs thereof, functional equivalents thereof, and fragments or variants thereofs. Functional equivalents can include alcohol dehydrogenases with the ability to efficiently convert acyl aldehydes (e.g., C₆, C₈, C₁₀, C₁₂, C₁₄, C₁₆, C₁₈, C_{20 aldehydes) into fatty alcohols. Specific examples of functional equivalents include long-chain alcohol dehydrogenases, having the ability to utilize long-chain aldehydes (e.g., C}₁₆, C₁₈, C₂₀) as substrates. In particular embodiments, the alcohol dehydrogenase has the amino acid sequence of SEQ ID NO:105 (encoded by the polynucleotide sequence of SEQ ID NO:104), or an active fragment or variant of this sequence. In some embodiments, the alcohol dehydrogenase has the amino acid sequence of SEQ ID NO:107 (encoded by the polynucleotide sequence of SEQ ID NO:106), or an active fragment or variant of this sequence.

[0355] Certain aspects may include modified photosynthetic microorganisms having reduced expression of an endogenous alcohol dehydrogenase. For instance, where the production of fatty acids, triglycerides, or alkanes/alkenes is desired, reduced expression of an alcohol dehydrogenase can shunt carbon away from production of fatty alcohols and towards fatty acids, triglycerides, or alkanes/alkenes, thereby increasing production of these latter lipids. Thus, certain aspects include mutations (e.g., genomic) such as point mutations or insertions that reduce or eliminate the expression and/or enzymatic activity of one or more endogenous alcohol dehydrogenases. Also included are full or partial deletions of an endogenous gene encoding an alcohol dehydrogenase involved in fatty alcohol synthesis.

[0356] Aldehyde Decarbonylases.

[0357] Embodiments of the present invention optionally include one or more introduced or expressed (e.g., overexpressed) alcohol decarbonylases. As used herein, an “aldehyde decarbonylase” is capable of catalyzing the conversion of an acyl aldehyde (or fatty aldehyde) to an alkane or alkene. Introduction or overexpression of an aldehyde decarbonylase can thus increase the production of alkanes and/or alkenes, optionally in combination with introduction or overexpression of an acyl-ACP reductase, and optionally in further combination with reduced expression of an aldehyde dehydrogenase, to shunt carbon away from fatty acids and towards alkanes/alkenes.

[0358] Included are members of the ferritin-like or ribonucleotide reductase-like family of nonheme diiron enzymes (see, e.g., Stubbe et al., Trends Biochem Sci. 23:438-43, 1998). Examples include PCC7942_orf1593 and PCC6803_orfsll0208 from Synechostis sp. PCC6803 and orthologs thereof, which can be found, for example, in N. punctiforme PCC73102, Thermosynechococcus elongatus BP-1, Synechococcus sp. Ja-3-3AB, P. marinus MIT9313, P. marinus NATL2A, and Synechococcus sp. RS 9117, the latter having at least two paralogs (RS 9117-1 and -2).

[0359] Certain embodiments include photosynthetic microorganism having reduced expression of one or more endogenous aldehyde decarbonylases. According to one non-limiting theory, because the aldehyde decarbonylase encoded by PCC7942_orf1593 or PCC6803_orfsll0208 (from Synechostis sp. PCC6803) utilizes acyl aldehyde as a substrate for alkane or alkene production, reducing expression of this protein may further increase yields of free fatty acids by shunting acyl aldehydes (produced by acyl-ACP reductase) away from an alkane-producing pathway, and towards a fatty acid-producing pathway. Included are mutations (e.g., genomic) that reduce or eliminate the expression and/or enzymatic activity of one or more endogenous aldehyde decarbonylases. Also included are full or partial deletions of an endogenous gene encoding an aldehyde decarbonylase.

[0360] Aldehyde Dehydrogenases.

[0361] Embodiments of the present invention optionally include one or more aldehyde dehydrogenases. Examples of aldehyde dehydrogenases include enzymes capable of using acyl aldehydes (e.g., nonyl-aldehyde, C16 fatty aldehyde) as a substrate, and converting them into fatty acids. In certain embodiments, the aldehyde dehydrogenase is naturally-occurring or endogenous to the modified microorganism, and is sufficient to convert increased acyl aldehydes (produced by acyl-ACP reductase) into fatty acids, and thereby contribute to increased fatty acid production and overall satisfactory growth characteristics.

[0362] In certain embodiments, the aldehyde dehydrogenase can be overexpressed, for example, by recombinantly introducing a polynucleotide that encodes the enzyme, increasing expression of an endogenous enzyme, or both. An aldehyde dehydrogenase can be overexpressed in a strain that already expresses a naturally-occurring or endogenous enzyme, to further increase fatty acid production of an acyl-ACP reductase over-expressing strain and/or improve its growth characteristics, relative, for example, to an acyl-ACP reductase-overexpressing strain that only expresses endogenous aldehyde dehydrogenase. An aldehyde dehydrogenase can also be expressed or overexpressed in a strain that does not have a naturally occurring aldehyde dehydrogenase of that type, e.g., it does not naturally express an enzyme that is capable of efficiently converting acyl aldehydes such as nonyl-aldehyde into fatty acids.

[0363] In these and related embodiments, expression or overexpression of an aldehyde dehydrogenase may increase shunting of acyl aldehydes towards production of fatty acids, and away from production of other products such as fatty alcohols alkanes. It may also reduce accumulation of potentially toxic acyl aldehydes, and thereby improve growth characteristics of a modified microorganism.

[0364] One exemplary aldehyde dehydrogenase is encoded by orf0489 of Synechococcus elongatus PCC7942. Also included are homologs or paralogs thereof, functional equivalents thereof, and fragments or variants thereofs. Functional equivalents can include aldehyde dehydrogenases with the ability to efficiently convert acyl aldehydes (e.g., nonyl-aldehyde) into fatty acids. In specific embodiments, the aldehyde dehydrogenase has the amino acid sequence of SEQ ID NO:103 (encoded by the polynucleotide sequence of SEQ ID NO:102), or an active fragment or variant of this sequence.

[0365] Certain embodiments include photosynthetic microorganism having reduced expression and/or activity of one or more endogenous aldehyde dehydrogenases, particularly those associated with production of fatty acids. In these and related embodiment, reducing the activity of endogenous aldehyde dehydrogenase can shunt carbon away from fatty acids and towards other desired carbon-containing compounds, such as alkanes/alkenes, fatty alcohols, and/or wax esters. Included are mutations (e.g., genomic) that reduce or eliminate the expression and/or enzymatic activity of one or more endogenous aldehyde dehydrogenases. Also included are full or partial deletions of an endogenous gene encoding an aldehyde dehydrogenase, such as orf0489 from Synechococcus elongatus PCC7942.

### Glucose Secretion Proteins

[0366] In additional embodiments, the modified photosynthetic microorganism with reduced glycogen accumulation are further modified to include one or more introduced or overexpressed polynucleotides involved in glucose secretion, to allow for continued secretion of glucose from glycogen deficient strains that are placed under stress conditions. Examples of such polypeptides include glucose permeases and glucose/H+ symporters, such as glcP (e.g., Bacillus subtilis168 glcP; NCBI NP_{—}388933; SEQ ID NO:176), glcP1 (e.g., Streptomyces coelicolor glcP1; NCBI NP_{—}629713.1; SEQ ID NO:177), glcP2 (e.g., Streptomyces coelicolor A3 glcP2; NCBI NP_{—}631212; SEQ ID NO:178), and Mycobacterium smegmatis MC2 155 (NCBI YP_{—}888461; SEQ ID NO:179), and functional fragments and variants thereof.

### Isobutanol/Isopentanol Synthesis Proteins

[0367] In particular embodiments, the modified photosynthetic microorganism with reduced glycogen accumulation are further modified to express one or more polypeptides associated with isobutanol and/or isopentanol biosynthesis, to allow for continued production of isobutanol and/or isopentanol from glycogen deficient strains that are placed under stress conditions. Examples of such polypeptides include 2-keto acid decarboxylases and certain alcohol dehydrogenases. For instance, one exemplary polypeptide includes an alpha-ketoisovalerate decarboxylase (2-keto acid decarboxylase) from Lactococcus lactis (SEQ ID NO:181), and another exemplary polypeptide includes an alcohol dehydrogenase (YqhD) from E. coli (SEQ ID NO:183). Also included are active variants and fragments thereof.

### 4-Hydroxybutyrate/1,4-Butanediol Synthesis Proteins

[0368] In some embodiments, the modified photosynthetic microorganism with reduced glycogen accumulation are further modified to express one or more polypeptides associated with 4-hydroxybutyrate and optionally 1,4-butanediol biosynthesis, to allow for continued production of 4-hydroxybutyrate and optionally 1,4-butanediol from glycogen deficient strains that are placed under stress conditions. Examples of such polypeptides include alpha-ketoglutarate decarboxylases, 4-hydroxybutyrate dehydrogenases, succinyl-CoA synthetases, succinate-semialdehyde dehydrogenases, 4-hydroxybutyryl-CoA transferases, and aldehyde/alcohol dehydrogenases (see FIG. 22). Specific examples include alpha-ketoglutarate decarboxylases encoded by CCDC5180_{—}0513 (SEQ ID NO:200) from Mycobacterium bovis and SYNPCC7002_A2770 (SEQ ID NO:202) from Synechococcus sp PCC 7002; 4-hydroxybutyrate dehydrogenases encoded by PGN_{—}0724 (SEQ ID NO:204) from Porphyromonas gingivalis and CKR_{—}2662 (SEQ ID NO:206) from Clostridium kluyveri; succinyl-CoA synthetases encoded by the alpha subunit sucC (b0728) (SEQ ID NO:214) from E. coli and the beta subunit sucD (b0729) (SEQ ID NO:216) from E. coli; succinate-semialdehyde dehydrogenase encoded by PGTDC60_{—}1813 (SEQ ID NO:218) from Porphyromonas gingivalis; 4-hydroxybutyryl-CoA transferases encoded by cat2 (CKR_{—}2666) (SEQ ID NO:208) from Clostridium kluyveri, and homologs from Clostridium aminobutyricum and Porphyromonas gingivalis; and aldehyde/alcohol dehydrogenases encoded by adhE2 (CEA_P0034) (SEQ ID NO:210) from Clostridium acetobutylicum and adhE (b1241) (SEQ ID NO:212) from E. coli. Also included are active variants and fragments thereof.

### Polyamine Synthesis Proteins

[0369] In certain embodiments, the modified photosynthetic microorganism with reduced glycogen accumulation are further modified to express one or more polypeptides associated with polyamine biosynthesis, to allow for continued production of polyamines or intermediates thereof from glycogen deficient strains that are placed under stress conditions. Exemplary polyamine precursors include agmatine and putrescine. Examples of such polypeptides include arginine decarboxylases to convert L-arginine into agmatine, agmatine deiminases to convert agmatine into N-carbamoylputrescine, and N-carbamoylputrescine amidases to convert N-carbamoylputrescine into putrescine. One example of an arginine decarboxylase is encoded by Synpcc7942_{—}1037 (SEQ ID NO:220) from S. elongatus PCC7942. Specific examples of agmatine deiminases are encoded by Synpcc7942_{—}2402 (SEQ ID NO:222) and Synpcc7942_{—}2461 from S. elongatus PCC7942. One exemplary N-carbamoylputrescine amidase is encoded by Synpcc7942_{—}2145 (SEQ ID NO:224) from S. elongatus PCC7942. Also included are active variants and fragments thereof.

### Polypeptide Variants and Fragments

[0370] As noted above, embodiments of the present invention include variants and fragments of any of the reference polypeptides and polynucleotides described herein (see, e.g., the Sequence Listing). Variant polypeptides are biologically active, that is, they continue to possess the enzymatic activity of a reference polypeptide. Such variants may result from, for example, genetic polymorphism and/or from human manipulation.

[0371] Biologically active variants of a reference polypeptide will have at least 40%, 50%, 60%, 70%, generally at least 75%, 80%, 85%, usually about 90% to 95% or more, and typically about 97% or 98% or more sequence similarity or identity to the amino acid sequence for a reference protein as determined by sequence alignment programs described elsewhere herein using default parameters. A biologically active variant of a reference polypeptide may differ from that protein generally by as much 200, 100, 50 or 20 amino acid residues or suitably by as few as 1-15 amino acid residues, as few as 1-10, such as 6-10, as few as 5, as few as 4, 3, 2, or even 1 amino acid residue. In some embodiments, a variant polypeptide differs from the reference sequences referred to herein (see, e.g., the Sequence Listing) by at least one but by less than 15, 10 or 5 amino acid residues. In other embodiments, it differs from the reference sequences by at least one residue but less than 20%, 15%, 10% or 5% of the residues.

[0372] A biologically active fragment can be a polypeptide fragment which is, for example, 10, 11, 12, 13, 14, 15, 16, 17, 18, 19, 20, 21, 22, 23, 24, 25, 26, 27, 28, 29, 30, 40, 50, 60, 70, 80, 90, 100, 110, 120, 130, 140, 150, 160, 170, 180, 190, 200, 220, 240, 260, 280, 300, 320, 340, 360, 380, 400, 450, 500, 600 or more contiguous amino acids, including all integers in between, of a reference polypeptide sequence.

[0373] A reference polypeptide may be altered in various ways including amino acid substitutions, deletions, truncations, and insertions. Methods for such manipulations are generally known in the art. For example, amino acid sequence variants of a reference polypeptide can be prepared by mutations in the DNA. Methods for mutagenesis and nucleotide sequence alterations are well known in the art. See, for example, Kunkel (1985, Proc. Natl. Acad. Sci. USA. 82: 488-492), Kunkel et al., (1987, Methods in Enzymol, 154: 367-382), U.S. Pat. No. 4,873,192, Watson, J. D. et al., (“Molecular Biology of the Gene”, Fourth Edition, Benjamin/Cummings, Menlo Park, Calif., 1987) and the references cited therein. Guidance as to appropriate amino acid substitutions that do not affect biological activity of the protein of interest may be found in the model of Dayhoff et al., (1978) Atlas of Protein Sequence and Structure (Natl. Biomed. Res. Found., Washington, D.C.).

[0374] Methods for screening gene products of combinatorial libraries made by point mutations or truncation, and for screening cDNA libraries for gene products having a selected property are known in the art. Such methods are adaptable for rapid screening of the gene libraries generated by combinatorial mutagenesis of reference polypeptides. Recursive ensemble mutagenesis (REM), a technique which enhances the frequency of functional mutants in the libraries, can be used in combination with the screening assays to identify polypeptide variants (Arkin and Yourvan (1992) Proc. Natl. Acad. Sci. USA 89: 7811-7815; Delgrave et al., (1993) Protein Engineering, 6: 327-331). Conservative substitutions, such as exchanging one amino acid with another having similar properties, may be desirable as discussed in more detail below.

[0375] Polypeptide variants may contain conservative amino acid substitutions at various locations along their sequence, as compared to a reference amino acid sequence. A “conservative amino acid substitution” is one in which the amino acid residue is replaced with an amino acid residue having a similar side chain. Families of amino acid residues having similar side chains have been defined in the art, which can be generally sub-classified as follows:

[0376] Acidic: The residue has a negative charge due to loss of H ion at physiological pH and the residue is attracted by aqueous solution so as to seek the surface positions in the conformation of a peptide in which it is contained when the peptide is in aqueous medium at physiological pH. Amino acids having an acidic side chain include glutamic acid and aspartic acid.

[0377] Basic: The residue has a positive charge due to association with H ion at physiological pH or within one or two pH units thereof (e.g., histidine) and the residue is attracted by aqueous solution so as to seek the surface positions in the conformation of a peptide in which it is contained when the peptide is in aqueous medium at physiological pH. Amino acids having a basic side chain include arginine, lysine and histidine.

[0378] Charged: The residues are charged at physiological pH and, therefore, include amino acids having acidic or basic side chains (i.e., glutamic acid, aspartic acid, arginine, lysine and histidine).

[0379] Hydrophobic: The residues are not charged at physiological pH and the residue is repelled by aqueous solution so as to seek the inner positions in the conformation of a peptide in which it is contained when the peptide is in aqueous medium. Amino acids having a hydrophobic side chain include tyrosine, valine, isoleucine, leucine, methionine, phenylalanine and tryptophan.

[0380] Neutral/polar: The residues are not charged at physiological pH, but the residue is not sufficiently repelled by aqueous solutions so that it would seek inner positions in the conformation of a peptide in which it is contained when the peptide is in aqueous medium. Amino acids having a neutral/polar side chain include asparagine, glutamine, cysteine, histidine, serine and threonine.

[0381] This description also characterizes certain amino acids as “small” since their side chains are not sufficiently large, even if polar groups are lacking, to confer hydrophobicity. With the exception of proline, “small” amino acids are those with four carbons or less when at least one polar group is on the side chain and three carbons or less when not. Amino acids having a small side chain include glycine, serine, alanine and threonine. The gene-encoded secondary amino acid proline is a special case due to its known effects on the secondary conformation of peptide chains. The structure of proline differs from all the other naturally-occurring amino acids in that its side chain is bonded to the nitrogen of the α-amino group, as well as the α-carbon. Several amino acid similarity matrices (e.g., PAM120 matrix and PAM250 matrix as disclosed for example by Dayhoff et al., (1978), A model of evolutionary change in proteins. Matrices for determining distance relationships In M. O. Dayhoff, (ed.), Atlas of protein sequence and structure, Vol. 5, pp. 345-358, National Biomedical Research Foundation, Washington DC; and by Gonnet et al., (Science, 256: 14430-1445, 1992), however, include proline in the same group as glycine, serine, alanine and threonine. Accordingly, for the purposes of the present invention, proline is classified as a “small” amino acid.

[0382] The degree of attraction or repulsion required for classification as polar or nonpolar is arbitrary and, therefore, amino acids specifically contemplated by the invention have been classified as one or the other. Most amino acids not specifically named can be classified on the basis of known behaviour.

[0383] Amino acid residues can be further sub-classified as cyclic or non-cyclic, and aromatic or non-aromatic, self-explanatory classifications with respect to the side-chain substituent groups of the residues, and as small or large. The residue is considered small if it contains a total of four carbon atoms or less, inclusive of the carboxyl carbon, provided an additional polar substituent is present; three or less if not. Small residues are, of course, always non-aromatic. Dependent on their structural properties, amino acid residues may fall in two or more classes. For the naturally-occurring protein amino acids, sub-classification according to this scheme is presented in Table A.

TABLE A
Amino acid sub-classification

| Sub-classes | Amino acids |
|---|---|
| Acidic | Aspartic acid, Glutamic acid |
| Basic | Noncyclic: Arginine, Lysine; Cyclic: Histidine |
| Charged | Aspartic acid, Glutamic acid, Arginine, Lysine, |
| | Histidine |
| Small | Glycine, Serine, Alanine, Threonine, Proline |
| Polar/neutral | Asparagine, Histidine, Glutamine, Cysteine, Serine, |
| | Threonine |
| Polar/large | Asparagine, Glutamine |
| Hydrophobic | Tyrosine, Valine, Isoleucine, Leucine, Methionine, |
| | Phenylalanine, Tryptophan |
| Aromatic | Tryptophan, Tyrosine, Phenylalanine, |
| Residues that | Glycine and Proline |
| influence chain | |
| orientation | |

[0384] Conservative amino acid substitution also includes groupings based on side chains. For example, a group of amino acids having aliphatic side chains is glycine, alanine, valine, leucine, and isoleucine; a group of amino acids having aliphatic-hydroxyl side chains is serine and threonine; a group of amino acids having amide-containing side chains is asparagine and glutamine; a group of amino acids having aromatic side chains is phenylalanine, tyrosine, and tryptophan; a group of amino acids having basic side chains is lysine, arginine, and histidine; and a group of amino acids having sulphur-containing side chains is cysteine and methionine. For example, it is reasonable to expect that replacement of a leucine with an isoleucine or valine, an aspartate with a glutamate, a threonine with a serine, or a similar replacement of an amino acid with a structurally related amino acid will not have a major effect on the properties of the resulting variant polypeptide. Whether an amino acid change results in a functional truncated and/or variant polypeptide can readily be determined by assaying its enzymatic activity, as described herein. Conservative substitutions are shown in Table B under the heading of exemplary substitutions. Amino acid substitutions falling within the scope of the invention, are, in general, accomplished by selecting substitutions that do not differ significantly in their effect on maintaining (a) the structure of the peptide backbone in the area of the substitution, (b) the charge or hydrophobicity of the molecule at the target site, or (c) the bulk of the side chain. After the substitutions are introduced, the variants are screened for biological activity.

TABLE B
Exemplary Amino Acid Substitutions

| Original | Exemplary | Preferred |
|---|---|---|
| Residue | Substitutions | Substitutions |
| Ala | Val, Leu, Ile | Val |
| Arg | Lys, Gln, Asn | Lys |
| Asn | Gln, His, Lys, Arg | Gln |
| Asp | Glu | Glu |
| Cys | Ser | Ser |
| Gln | Asn, His, Lys, | Asn |
| Glu | Asp, Lys | Asp |
| Gly | Pro | Pro |
| His | Asn, Gln, Lys, Arg | Arg |
| Ile | Leu, Val, Met, Ala, Phe, Norleu | Leu |
| Leu | Norleu, Ile, Val, Met, Ala, Phe | Ile |
| Lys | Arg, Gln, Asn | Arg |
| Met | Leu, Ile, Phe | Leu |
| Phe | Leu, Val, Ile, Ala | Leu |
| Pro | Gly | Gly |
| Ser | Thr | Thr |
| Thr | Ser | Ser |
| Trp | Tyr | Tyr |
| Tyr | Trp, Phe, Thr, Ser | Phe |
| Val | Ile, Leu, Met, Phe, Ala, Norleu | Leu |

[0385] Alternatively, similar amino acids for making conservative substitutions can be grouped into three categories based on the identity of the side chains. The first group includes glutamic acid, aspartic acid, arginine, lysine, histidine, which all have charged side chains; the second group includes glycine, serine, threonine, cysteine, tyrosine, glutamine, asparagine; and the third group includes leucine, isoleucine, valine, alanine, proline, phenylalanine, tryptophan, methionine, as described in Zubay, G., Biochemistry, third edition, Wm. C. Brown Publishers (1993).

[0386] Thus, a predicted non-essential amino acid residue in reference polypeptide is typically replaced with another amino acid residue from the same side chain family. Alternatively, mutations can be introduced randomly along all or part of a coding sequence, such as by saturation mutagenesis, and the resultant mutants can be screened for an activity of the parent polypeptide to identify mutants which retain that activity. Following mutagenesis of the coding sequences, the encoded peptide can be expressed recombinantly and the activity of the peptide can be determined. A “non-essential” amino acid residue is a residue that can be altered from the wild-type sequence of an embodiment polypeptide without abolishing or substantially altering one or more of its activities. Suitably, the alteration does not substantially abolish one of these activities, for example, the activity is at least 20%, 40%, 60%, 70% or 80% 100%, 500%, 1000% or more of wild-type. An “essential” amino acid residue is a residue that, when altered from the wild-type sequence of a reference polypeptide, results in abolition of an activity of the parent molecule such that less than 20% of the wild-type activity is present. For example, such essential amino acid residues may include those that are conserved in the enzymatic sites of reference polypeptides from various sources.

[0387] Accordingly, the present invention also contemplates variants of the naturally-occurring reference polypeptide sequences or their biologically-active fragments, wherein the variants are distinguished from the naturally-occurring sequence by the addition, deletion, or substitution of one or more amino acid residues. In general, variants will display at least about 30, 40, 50, 55, 60, 65, 70, 75, 80, 85, 90, 91, 92, 93, 94, 95, 96, 97, 98, 99% similarity or sequence identity to a reference polypeptide sequence. Moreover, sequences differing from the native or parent sequences by the addition, deletion, or substitution of 1, 2, 3, 4, 5, 6, 7, 8, 9, 10, 11, 12, 13, 14, 15, 16, 17, 18, 19, 20, 30, 40, 50, 60, 70, 80, 90, 100 or more amino acids but which retain the properties of a parent or reference polypeptide sequence are contemplated.

[0388] In some embodiments, variant polypeptides differ from a reference polypeptide sequence by at least one but by less than 50, 40, 30, 20, 15, 10, 8, 6, 5, 4, 3 or 2 amino acid residue(s). In other embodiments, variant polypeptides differ from a reference sequence by at least 1% but less than 20%, 15%, 10% or 5% of the residues. (If this comparison requires alignment, the sequences should be aligned for maximum similarity. “Looped” out sequences from deletions or insertions, or mismatches, are considered differences.)

[0389] In certain embodiments, a variant polypeptide includes an amino acid sequence having at least about 50%, 55%, 60%, 65%, 70%, 75%, 80%, 85%, 90%, 91%, 92%, 93%, 94% 95%, 96%, 97%, 98% or more sequence identity or similarity to a corresponding sequence of a reference polypeptide described herein, and retains the enzymatic activity of that reference polypeptide.

[0390] Calculations of sequence similarity or sequence identity between sequences (the terms are used interchangeably herein) are performed as follows. To determine the percent identity of two amino acid sequences, or of two nucleic acid sequences, the sequences are aligned for optimal comparison purposes (e.g., gaps can be introduced in one or both of a first and a second amino acid or nucleic acid sequence for optimal alignment and non-homologous sequences can be disregarded for comparison purposes). In certain embodiments, the length of a reference sequence aligned for comparison purposes is at least 30%, preferably at least 40%, more preferably at least 50%, 60%, and even more preferably at least 70%, 80%, 90%, 100% of the length of the reference sequence. The amino acid residues or nucleotides at corresponding amino acid positions or nucleotide positions are then compared. When a position in the first sequence is occupied by the same amino acid residue or nucleotide as the corresponding position in the second sequence, then the molecules are identical at that position.

[0391] The percent identity between the two sequences is a function of the number of identical positions shared by the sequences, taking into account the number of gaps, and the length of each gap, which need to be introduced for optimal alignment of the two sequences.

[0392] The comparison of sequences and determination of percent identity between two sequences can be accomplished using a mathematical algorithm. In a preferred embodiment, the percent identity between two amino acid sequences is determined using the Needleman and Wunsch, (1970, J. Mol. Biol. 48: 444-453) algorithm which has been incorporated into the GAP program in the GCG software package, using either a Blossum 62 matrix or a PAM250 matrix, and a gap weight of 16, 14, 12, 10, 8, 6, or 4 and a length weight of 1, 2, 3, 4, 5, or 6. In yet another preferred embodiment, the percent identity between two nucleotide sequences is determined using the GAP program in the GCG software package, using a NWSgapdna.CMP matrix and a gap weight of 40, 50, 60, 70, or 80 and a length weight of 1, 2, 3, 4, 5, or 6. A particularly preferred set of parameters (and the one that should be used unless otherwise specified) are a Blossum 62 scoring matrix with a gap penalty of 12, a gap extend penalty of 4, and a frameshift gap penalty of 5.

[0393] The percent identity between two amino acid or nucleotide sequences can be determined using the algorithm of E. Meyers and W. Miller (1989, Cabios, 4: 11-17) which has been incorporated into the ALIGN program (version 2.0), using a PAM120 weight residue table, a gap length penalty of 12 and a gap penalty of 4.

[0394] The nucleic acid and protein sequences described herein can be used as a “query sequence” to perform a search against public databases to, for example, identify other family members or related sequences. Such searches can be performed using the NBLAST and XBLAST programs (version 2.0) of Altschul, et al., (1990, J. Mol. Biol, 215: 403-10). BLAST nucleotide searches can be performed with the NBLAST program, score=100, wordlength=12 to obtain nucleotide sequences homologous to nucleic acid molecules of the invention. BLAST protein searches can be performed with the XBLAST program, score=50, wordlength=3 to obtain amino acid sequences homologous to protein molecules of the invention. To obtain gapped alignments for comparison purposes, Gapped BLAST can be utilized as described in Altschul et al., (1997, Nucleic Acids Res, 25: 3389-3402). When utilizing BLAST and Gapped BLAST programs, the default parameters of the respective programs (e.g., XBLAST and NBLAST) can be used.

[0395] In one embodiment, as noted above, polynucleotides and/or polypeptides can be evaluated using a BLAST alignment tool. A local alignment consists simply of a pair of sequence segments, one from each of the sequences being compared. A modification of Smith-Waterman or Sellers algorithms will find all segment pairs whose scores cannot be improved by extension or trimming, called high-scoring segment pairs (HSPs). The results of the BLAST alignments include statistical measures to indicate the likelihood that the BLAST score can be expected from chance alone.

[0396] The raw score, S, is calculated from the number of gaps and substitutions associated with each aligned sequence wherein higher similarity scores indicate a more significant alignment. Substitution scores are given by a look-up table (see PAM, BLOSUM).

[0397] Gap scores are typically calculated as the sum of G, the gap opening penalty and L, the gap extension penalty. For a gap of length n, the gap cost would be G+Ln. The choice of gap costs, G and L is empirical, but it is customary to choose a high value for G (10-15), e.g., 11, and a low value for L (1-2) e.g., 1.

[0398] The bit score, S′, is derived from the raw alignment score S in which the statistical properties of the scoring system used have been taken into account. Bit scores are normalized with respect to the scoring system, therefore they can be used to compare alignment scores from different searches. The terms “bit score” and “similarity score” are used interchangeably. The bit score gives an indication of how good the alignment is; the higher the score, the better the alignment.

[0399] The E-Value, or expected value, describes the likelihood that a sequence with a similar score will occur in the database by chance. It is a prediction of the number of different alignments with scores equivalent to or better than S that are expected to occur in a database search by chance. The smaller the E-Value, the more significant the alignment. For example, an alignment having an E value of e⁻¹¹⁷ means that a sequence with a similar score is very unlikely to occur simply by chance. Additionally, the expected score for aligning a random pair of amino acids is required to be negative, otherwise long alignments would tend to have high score independently of whether the segments aligned were related. Additionally, the BLAST algorithm uses an appropriate substitution matrix, nucleotide or amino acid and for gapped alignments uses gap creation and extension penalties. For example, BLAST alignment and comparison of polypeptide sequences are typically done using the BLOSUM62 matrix, a gap existence penalty of 11 and a gap extension penalty of 1.

[0400] In one embodiment, sequence similarity scores are reported from BLAST analyses done using the BLOSUM62 matrix, a gap existence penalty of 11 and a gap extension penalty of 1.

[0401] In a particular embodiment, sequence identity/similarity scores provided herein refer to the value obtained using GAP Version 10 (GCG, Accelrys, San Diego, Calif.) using the following parameters: % identity and % similarity for a nucleotide sequence using GAP Weight of 50 and Length Weight of 3, and the nwsgapdna.cmp scoring matrix; % identity and % similarity for an amino acid sequence using GAP Weight of 8 and Length Weight of 2, and the BLOSUM62 scoring matrix (Henikoff and Henikoff, PNAS USA. 89:10915-10919, 1992). GAP uses the algorithm of Needleman and Wunsch (J Mol Biol. 48:443-453, 1970) to find the alignment of two complete sequences that maximizes the number of matches and minimizes the number of gaps.

[0402] In one particular embodiment, the variant polypeptide comprises an amino acid sequence that can be optimally aligned with a reference polypeptide sequence (see, e.g., Sequence Listing) to generate a BLAST bit scores or sequence similarity scores of at least about 50, 60, 70, 80, 90, 100, 100, 110, 120, 130, 140, 150, 160, 170, 180, 190, 200, 210, 220, 230, 240, 250, 260, 270, 280, 290, 300, 310, 320, 330, 340, 350, 360, 370, 380, 390, 400, 410, 420, 430, 440, 450, 460, 470, 480, 490, 500, 510, 520, 530, 540, 550, 560, 570, 580, 590, 600, 610, 620, 630, 640, 650, 660, 670, 680, 690, 700, 710, 720, 730, 740, 750, 760, 770, 780, 790, 800, 810, 820, 830, 840, 850, 860, 870, 880, 890, 900, 910, 920, 930, 940, 950, 960, 970, 980, 990, 1000, or more, including all integers and ranges in between, wherein the BLAST alignment used the BLOSUM62 matrix, a gap existence penalty of 11, and a gap extension penalty of 1.

[0403] Variants can be identified by screening combinatorial libraries of mutants of a reference polypeptide. Libraries or fragments e.g., N terminal, C terminal, or internal fragments, of protein coding sequence can be used to generate a variegated population of fragments for screening and subsequent selection of variants of a reference polypeptide.

[0404] Methods for screening gene products of combinatorial libraries made by point mutation or truncation, and for screening cDNA libraries for gene products having a selected property are known in the art. Such methods are adaptable for rapid screening of the gene libraries generated by combinatorial mutagenesis of polypeptides.

[0405] The present invention also contemplates the use of chimeric or fusion proteins for increasing lipid or fatty acid production and/or producing triglycerides. As used herein, a “chimeric protein” or “fusion protein” includes a reference polypeptide or a polypeptide fragment thereof linked to either another reference polypeptide (e.g., to create multiple fragments), to a non-reference polypeptide, or to both. A “non-reference polypeptide” refers to a “heterologous polypeptide” having an amino acid sequence corresponding to a protein which is different from the reference protein sequence, and which is derived from the same or a different organism. The reference polypeptide of the fusion protein can correspond to all or a portion of a biologically active amino acid sequence. In certain embodiments, a fusion protein includes at least one or two biologically active portions of a reference polypeptide. The polypeptides forming the fusion protein are typically linked C-terminus to N-terminus, although they can also be linked C-terminus to C-terminus, N-terminus to N-terminus, or N-terminus to C-terminus. The polypeptides of the fusion protein can be in any order.

[0406] The fusion partner may be designed and included for essentially any desired purpose provided they do not adversely affect the enzymatic activity of the polypeptide. For example, in one embodiment, a fusion partner may comprise a sequence that assists in expressing the protein (an expression enhancer) at higher yields than the native recombinant protein. Other fusion partners may be selected so as to increase the solubility or stability of the protein or to enable the protein to be targeted to desired intracellular compartments.

[0407] The fusion protein can include a moiety which has a high affinity for a ligand. For example, the fusion protein can be a GST-fusion protein in which the reference polypeptide sequences are fused to the C-terminus of the GST sequences. Such fusion proteins can facilitate the purification and/or identification of the resulting polypeptide. Alternatively, the fusion protein can be reference polypeptide containing a heterologous signal sequence at its N-terminus. In certain host cells, expression and/or secretion of such proteins can be increased through use of a heterologous signal sequence.

[0408] Fusion proteins may generally be prepared using standard techniques. For example, DNA sequences encoding the polypeptide components of a desired fusion may be assembled separately, and ligated into an appropriate expression vector. The 3′ end of the DNA sequence encoding one polypeptide component is ligated, with or without a peptide linker, to the 5′ end of a DNA sequence encoding the second polypeptide component so that the reading frames of the sequences are in phase. This permits translation into a single fusion protein that retains the biological activity of both component polypeptides.

[0409] A peptide linker sequence may be employed to separate the first and second polypeptide components by a distance sufficient to ensure that each polypeptide folds into its secondary and tertiary structures, if desired. Such a peptide linker sequence is incorporated into the fusion protein using standard techniques well known in the art. Certain peptide linker sequences may be chosen based on the following factors: (1) their ability to adopt a flexible extended conformation; (2) their inability to adopt a secondary structure that could interact with functional epitopes on the first and second polypeptides; and (3) the lack of hydrophobic or charged residues that might react with the polypeptide functional epitopes. Preferred peptide linker sequences contain Gly, Asn and Ser residues. Other near neutral amino acids, such as Thr and Ala may also be used in the linker sequence. Amino acid sequences which may be usefully employed as linkers include those disclosed in Maratea et al., Gene 40:39 46 (1985); Murphy et al., Proc. Natl. Acad. Sci. USA 83:8258 8262 (1986); U.S. Pat. No. 4,935,233 and U.S. Pat. No. 4,751,180. The linker sequence may generally be from 1 to about 50 amino acids in length. Linker sequences are not required when the first and second polypeptides have non-essential N-terminal amino acid regions that can be used to separate the functional domains and prevent steric interference.

[0410] The ligated DNA sequences may be operably linked to suitable transcriptional or translational regulatory elements. Certain of the regulatory elements responsible for expression of DNA are located 5′ to the DNA sequence encoding the first polypeptides. Similarly, other regulatory elements such as stop codons required to end translation and transcription termination signals are present 3′ to the DNA sequence encoding the second polypeptide.

[0411] In general, polypeptides and fusion polypeptides (as well as their encoding polynucleotides) are isolated. An “isolated” polypeptide or polynucleotide is one that is removed from its original environment. For example, a naturally-occurring protein is isolated if it is separated from some or all of the coexisting materials in the natural system. Preferably, such polypeptides are at least about 90% pure, more preferably at least about 95% pure and most preferably at least about 99% pure. A polynucleotide is considered to be isolated if, for example, it is cloned into a vector that is not a part of the natural environment.

### Polynucleotides and Vectors

[0412] Certain modified photosynthetic microorganisms (e.g., Cyanobacteria) of the present invention comprise one or more introduced polynucleotides encoding a reference polypeptide described herein. Examples include polynucleotides that encode one or more polypeptides associated with glycogen breakdown, secretion of glycogen precursors, glucose secretion, and biosynthesis of lipids or other carbon-containing compounds described herein, such as isobutanol, isopentanol, 4-hydroxybutyrate, 1,4-butanediol, and polyamines or intermediates thereof such as agmatine and putrescine. Also included are nucleotide sequences that encode any functional naturally-occurring variants or fragments (i.e., allelic variants, orthologs, splice variants) or non-naturally occurring variants or fragments of these native enzymes (i.e., optimized by engineering), as well as compositions comprising such polynucleotides, including, e.g., cloning and expression vectors.

[0413] As used herein, the terms “DNA” and “polynucleotide” and “nucleic acid” refer to a DNA molecule that has been isolated free of total genomic DNA of a particular species. Therefore, a DNA segment encoding a polypeptide refers to a DNA segment that contains one or more coding sequences yet is substantially isolated away from, or purified free from, total genomic DNA of the species from which the DNA segment is obtained. Included within the terms “DNA segment” and “polynucleotide” are DNA segments and smaller fragments of such segments, and also recombinant vectors, including, for example, plasmids, cosmids, phagemids, phage, viruses, and the like.

[0414] As will be understood by those skilled in the art, the polynucleotide sequences of this invention can include genomic sequences, extra-genomic and plasmid-encoded sequences and smaller engineered gene segments that express, or may be adapted to express, proteins, polypeptides, peptides and the like. Such segments may be naturally isolated, or modified synthetically by the hand of man.

[0415] As will be recognized by the skilled artisan, polynucleotides may be single-stranded (coding or antisense) or double-stranded, and may be DNA (genomic, cDNA or synthetic) or RNA molecules. Additional coding or non-coding sequences may, but need not, be present within a polynucleotide of the present invention, and a polynucleotide may, but need not, be linked to other molecules and/or support materials.

[0416] Polynucleotides may comprise a native sequence (e.g., an endogenous sequence that encodes an acyl-ACP reductase, an ACP, a diacylglycerol acyltransferase, a fatty acyl-CoA synthetase, a glycogen breakdown protein, an acetyl-CoA carboxylase, aldehyde dehydrogenase, or a portion thereof) or may comprise a variant, or a biological functional equivalent of such a sequence.

[0417] Polynucleotide variants may contain one or more substitutions, additions, deletions and/or insertions, as further described below, preferably such that the enzymatic activity of the encoded polypeptide is not substantially diminished relative to the unmodified polypeptide. The effect on the enzymatic activity of the encoded polypeptide may generally be assessed as described herein.

[0418] In certain embodiments, a modified photosynthetic microorganism comprises one or more polynucleotides encoding one or more acyl-ACP reductase polypeptides. Exemplary acyl-ACP reductase nucleotide sequences include orf1954 from Synechococcus elongatus PCC7942 (SEQ ID NO:1), and orfsll0209 from Synechocystis sp. PCC6803 (SEQ ID NO:3).

[0419] In certain embodiments, a modified photosynthetic microorganism comprises one or more polynucleotides encoding one or more acyl carrier proteins (ACP). Exemplary ACP nucleotide sequences include SEQ ID NO:5 from Synechococcus elongatus PCC7942, SEQ ID NOS:7, 9, and 11 from Acinetobacter sp. ADP1, and SEQ ID NO:13 from Spinacia oleracea.

[0420] In certain embodiments of the present invention, a polynucleotide encodes an acetyl-CoA carboxylase (ACCase) comprising or consisting of a polypeptide sequence set forth in any of SEQ ID NOs:55, 45, 46, 47, 48 or 49, or a fragment or variant thereof. In particular embodiments, a ACCase polynucleotide comprises or consists of a polynucleotide sequence set forth in any of SEQ ID NOs:56, 57, 50, 51, 52, 53 or 54, or a fragment or variant thereof. SEQ ID NO:55 is the sequence of Saccharomyces cerevisiae acetyl-CoA carboxylase (yAcc1); and SEQ ID NO:56 is a codon-optimized for expression in Cyanobacteria sequence that encodes yAcc1. SEQ ID NO:45 is Synechococcus sp. PCC 7002 AccA; SEQ ID NO:46 is Synechococcus sp. PCC 7002 AccB; SEQ ID NO:47 is Synechococcus sp. PCC 7002 AccC; and SEQ ID NO:48 is Synechococcus sp. PCC 7002 AccD. SEQ ID NO:50 encodes Synechococcus sp. PCC 7002 AccA; SEQ ID NO:51 encodes Synechococcus sp. PCC 7002 AccB; SEQ ID NO:52 encodes Synechococcus sp. PCC 7002 AccC; and SEQ ID NO:53 encodes Synechococcus sp. PCC 7002 AccD. SEQ ID NO:49 is a Triticum aestivum ACCase; and SEQ ID NO:54 encodes this Triticum aestivum ACCase.

[0421] In certain embodiments, a modified photosynthetic microorganism comprises one or more polynucleotides encoding one or more DGAT enzymes. In certain embodiments of the present invention, a polynucleotide encodes a DGAT comprising of consisting of a polypeptide sequence set forth in any one of SEQ ID NOs:58, 59, 60 or 61, or a fragment or variant thereof. SEQ ID NO:58 is the sequence of DGATn; SEQ ID NO: 59 is the sequence of Streptomyces coelicolor DGAT (ScoDGAT or SDGAT); SEQ ID NO:60 is the sequence of Alcanivorax borkumensis DGAT (AboDGAT); and SEQ ID NO:61 is the sequence of DGATd (Acinetobacter baylii sp.). In certain embodiments of the present invention, a DGAT polynucleotide comprises or consists of a polynucleotide sequence set forth in any one of SEQ ID NOs:62, 63, 64, 65 or 66, or a fragment or variant thereof. SEQ ID NO:62 is a codon-optimized for expression in Cyanbacteria sequence that encodes DGATn; SEQ ID NO: 63 has homology to SEQ ID NO:62; SEQ ID NO:64 is a codon-optimized for expression in Cyanobacteria sequence that encodes ScoDGAT; SEQ ID NO:65 is a codon-optimized for expression in Cyanobacteria sequence that encodes AboDGAT; and SEQ ID NO:66 is a codon-optimized for expression in Cyanobacteria sequence that encodes DGATd. DGATn and DGATd correspond to Acinetobacter baylii DGAT and a modified form thereof, which includes two additional amino acid residues immediately following the initiator methionine.

[0422] Certain embodiments employ one or more fatty acyl-CoA synthetase encoding polynucleotide sequences. One exemplary fatty acyl-CoA synthetase includes the FadD gene from E. coli (SEQ ID NO:16) which encodes a fatty acyl-CoA synthetase having substrate specificity for medium and long chain fatty acids. Other exemplary fatty acyl-CoA synthetases include those derived from S. cerevisiae; for example, the Faa1p coding sequence is set forth in SEQ ID NO:18, the Faa2p coding sequence is set forth in SEQ ID NO:20, and the Faa3p is set forth in SEQ ID NO:22. SEQ ID NO:22 is codon-optimized for expression is S. elongatus PCC7942.

[0423] Certain embodiments may employ one or more aldehyde dehydrogenase encoding polynucleotide sequences. One exemplary aldehyde dehydrogenase is orf0489 of Synechococcus elongatus PCC7942 (SEQ ID NO:102). Also included are active fragments or variants of this sequence.

[0424] Certain embodiments may employ one or more alcohol dehydrogenase encoding polynucleotide sequences. Exemplary alcohol dehydrogenases include slr1192 of Synechocystis sp. PCC6803 (SEQ ID NO:104) and ACIAD3612 from Acinetobacter baylyi (SEQ ID NO:106).

[0425] In certain embodiments of the present invention, a modified photosynthetic microorganism comprise one or more polynucleotides encoding one or more polypeptides associated with a glycogen breakdown, or a fragment or variant thereof. In particular embodiments, the one or more polypeptides are glycogen phosphorylase (GlgP), glycogen isoamylase (GlgX), glucanotransferase (MalQ), phosphoglucomutase (Pgm), glucokinase (Glk), and/or phosphoglucose isomerase (Pgi), or a functional fragment or variant thereof. A representative glgP polynucleotide sequence is provided in SEQ ID NO:67, and a representative GlgP polypeptide sequence is provided in SEQ ID NO:68. A representative glgX polynucleotide sequence is provided in SEQ ID NO:69, and a representative GlgX polypeptide sequence is provided in SEQ ID NO:70. A representative malQ polynucleotide sequence is provided in SEQ ID NO:71, and a representative MalQ polypeptide sequence is provide in SEQ ID NO:72. A representative phosphoglucomutase (pgm) polynucleotide sequence is provided in SEQ ID NO:24, and a representative phosphoglucomutase (Pgm) polypeptide sequence is provided in SEQ ID NO:73, with others provided infra (SEQ ID NOs:25, 26, 74-81). A representative glk polynucleotide sequence is provided in SEQ ID NO:82, and a representative Glk polypeptide sequence is provided in SEQ ID NO:83. A representative pgi polynucleotide sequence is provided in SEQ ID NO:84, and a representative Pgi polypeptide sequence is provided in SEQ ID NO:85. In particular embodiments of the present invention, a polynucleotide comprises one of these polynucleotide sequences, or a fragment or variant thereof, or encodes one of these polypeptide sequences, or a fragment or variant thereof.

[0426] In certain embodiments, the present invention provides isolated polynucleotides comprising various lengths of contiguous stretches of sequence identical to or complementary to a polypeptide described herein, such as an acyl-ACP reductase, acyl carrier protein (ACP), acetyl-CoA carboxylase (ACCase), glycogen breakdown protein, diacylglycerol acyltransferase (DGAT), aldehyde dehydrogenase, or fatty acyl-CoA synthetase, wherein the isolated polynucleotides encode a biologically active, truncated enzyme.

[0427] In certain embodiments, a modified photosynthetic microorganism comprises one or more polynucleotides encoding one or more thioesterases (TES) including acyl-ACP thioesterases and/or acyl-CoA thioesterases. In certain embodiments, the polynucleotide sequence of the TES encodes a TesA or TesB polypeptide from E. coli, or a cytoplasmic TesA variant (*TesA) having the sequence set forth in SEQ ID NO:121.

[0428] In certain embodiments, the polynucleotide sequence of the TES comprises that of the FatB gene, encoding a FatB enzyme, such as a C8, C12, C14, C16, or C18 FatB enzyme. In certain embodiments, the polynucleotide encodes a thioesterase (e.g., FatB thioesterase), having only thioesterase activity and little or no lysophospholipase activity. In specific embodiments, the thioesterase is a FatB acyl-ACP thioesterase, which can hydrolyze acyl-ACP but not acyl-CoA. SEQ ID NO:197 is an exemplary nucleotide sequence of a C8/C10 FatB2 thioesterase derived from Cuphea hookeriana, and SEQ ID NO:122 is codon-optimized for expression in Cyanobacteria. SEQ ID NO:123 is an exemplary nucleotide sequence of a C12 FatB1 acyl-ACP thioesterase derived from Umbellularia californica, and SEQ ID NO:124 is a codon-optimized version of SEQ ID NO:123 for optimal expression in Cyanobacteria. SEQ ID NO:126 is an exemplary nucleotide sequence of a C14 FatB1 thioesterase derived from Cinnamomum camphora, and SEQ:125 is a codon-optimized version of SEQ ID NO:126. SEQ ID NO:127 is an exemplary nucleotide sequence of a C16 FatB1 thioesterase derived from Cuphea hookeriana, and SEQ ID NO:128 is a codon-optimized version of SEQ ID NO:127. In certain embodiments, one or more FatB sequences are operably linked to a strong promoter, such as a Ptrc promoter. In other embodiments, one or more FatB sequences are operably linked to a relatively weak promoter, such as an arabinose promoter.

[0429] In certain embodiments of the present invention, a polynucleotide encodes a phosphatidate phosphatase (also referred to as a phosphatidic acid phosphatase; PAP) comprising or consisting of a polypeptide sequence set forth in SEQ ID NO:131, or a fragment or variant thereof. In particular embodiments, a phosphatidate phosphatase polynucleotide comprises or consists of a polynucleotide sequence set forth in SEQ ID NO:129 or SEQ ID NO:130, or a fragment or variant thereof. SEQ ID NO:131 is the sequence of Saccharomyces cerevisiae phosphatidate phosphatase (yPAH1), and SEQ ID NO:129 is a codon-optimized for expression in Cyanobacteria sequence that encodes yPAH1. In certain embodiments, the nucleotide sequence of the PAP is derived from the E. coli PgpB gene, and/or the PAP gene from Synechocystis sp. PCC6803.

[0430] In certain embodiments of the present invention, a modified photosynthetic microorganism comprises one or more polynucleotides encoding one or more phospholipases, including lysophospholipases, or a fragment or variant thereof. In certain embodiments, the encoded lysophospholipase is Lysophospholipase L1 (TesA), Lysophospholipase L2, TesB, Vu Patatin 1 protein, or a homolog thereof.

[0431] In particular embodiments, the encoded phospholipase, e.g., a lysophospholipase, is a bacterial phospholipase, or a fragment or variant thereof, and the polynucleotide comprises a bacterial phospholipase polynucleotide sequence, e.g., a sequence derived from Escherichia coli, Enterococcus faecalis, or Lactobacillus plantarum. In particular embodiments, the encoded phospholipase is Lysophospholipase L1 (TesA), Lysophospholipase L2, TesB, Vu Patatin 1 protein, or a functional fragment thereof.

[0432] In certain embodiments, a lysophospholipase is a bacterial Lysophospholipase L1 (TesA) or TesB, such as an E. coli Lysophospholipase L1 encoded by a polynucleotide (pldC) having the wild-type sequence set forth in SEQ ID NO:196, or an E. coli TesB encoded by a polynucleotide having the wild-type sequence set forth in SEQ ID NO:132. The polypeptide sequence of E. coli Lysophospholipase L1 is provided in SEQ ID NO:133, and the polypeptide sequence of E. coli TesB is provided in SEQ ID NO:134. In other embodiments, a lysophospholipase is a Lysophospholipase L2, such as an E. coli Lysophospholipase L2 encoded by a polynucleotide (pldB) having the wild-type sequence set forth in SEQ ID NO:135, or a Vu patatin 1 protein encoded by a polynucleotide having the wild-type sequence set forth in SEQ ID NO:136. The polypeptide sequence of E. coli Lysophospholipase L2 is provided in SEQ ID NO:137, and the polypeptide sequence of Vu patatin 1 protein is provided in SEQ ID NO:138.

[0433] In particular embodiments, the polynucleotide encoding the phospholipase variant is modified such that it encodes a phospholipase that localizes predominantly to the cytoplasm instead of the periplasm. For example, it may encode a phospholipase having a deletion or mutation in a region associated with periplasmic localization. In particular embodiments, the encoded phospholipase variant is derived from Lysophospholipase L1 (TesA). In certain embodiments, the Lysophospholipase L1 (TesA) variant is a bacterial TesA, such as an E. coli Lysophospholipase (TesA) variant encoded by a polynucleotide having the sequence set forth in SEQ ID NO:139. The polypeptide sequence of the Lysophospholipase L1 variant is provided in SEQ ID NO:121 (PldC(*TesA)).

[0434] Additional examples of phospholipase-encoding polynucleotide sequences include phospholipase A1 (PldA) from Acinetobacter sp. ADP1 (SEQ ID NO:140), phospholipase A (PldA) from E. coli (SEQ ID NO:141), phospholipase from Streptomyces coelicolor A3(2) (SEQ ID NO:142), phospholipase A2 (PLA2-α) from Arabidopsis thaliana (SEQ ID NO:143). phospholipase A1/triacylglycerol lipase (DAD1; Defective Anther Dehiscence 1) from Arabidopsis thaliana (SEQ ID NO:144), chloroplast DONGLE from Arabidopsis thaliana (SEQ ID NO:145), patatin-like protein from Arabidopsis thaliana (SEQ ID NO:146), and patatin from Anabaena variabilis ATCC 29413 (SEQ ID NO:147). Additional non-limiting examples of lysophospholipase-encoding polynucleotide sequences include phospholipase B (Plb1p) from Saccharomyces cerevisiae S288c (SEQ ID NO:148), phospholipase B (Plb2p) from Saccharomyces cerevisiae S288c (SEQ ID NO:149), ACIAD1057 (TesA homolog) from Acinetobacter ADP1 (SEQ ID NO:150), ACIAD1943 lysophospholipase from Acinetobacter ADP1 (SEQ ID NO:151), and a lysophospholipase (YP_{—}702320; RHA1_ro02357) from Rhodococcus (SEQ ID NO:152).

[0435] Certain embodiments employ one or more TAG hydrolase encoding polynucleotide sequences. Non-limiting examples of TAG hydrolase polynucleotide sequences include SDP1 (SUGAR-DEPENDENT1) triacylglycerol lipase from Arabidopsis thaliana (SEQ ID NO:153), ACIAD1335 from Acinetobacter sp. ADP1 (SEQ ID NO:154), TG14P from S. cerevisiae (SEQ ID NO:175), and RHA1_ro04722 (YP_{—}704665) TAG lipase from Rhodococcus (SEQ ID NO:155). Additional polynucleotide sequences for exemplary lipases/esterases include RHA1_ro01602 lipase/esterase from Rhodococcus sp. (see SEQ ID NO:156), and the RHA1_ro06856 lipase/esterase (see SEQ ID NO:119) from Rhodococcus sp.

[0436] Particular embodiments employ glucose permease or glucose/H+ symporter encoding polynucleotide sequences. Non-limiting examples include those that encode glcP (e.g., Bacillus subtilis168 glcP; NCBI NP_{—}388933; SEQ ID NO:176), glcP1 (e.g., Streptomyces coelicolor glcP1; NCBI NP_{—}629713.1; SEQ ID NO:177), glcP2 (e.g., Streptomyces coelicolor A3 glcP2; NCBI NP_{—}631212; SEQ ID NO:178), and Mycobacterium smegmatis MC2 155 (NCBI YP_{—}888461; SEQ ID NO:179).

[0437] Certain embodiments employ polynucleotides that encode polypeptides associated with the biosynthesis of isobutanol and/or isopentanol. Examples of such polynucleotides include those that encode a 2-keto acid decarboxylase and those that encode an alcohol dehydrogenase. Specific examples include the alpha-ketoisovalerate decarboxylase (2-keto acid decarboxylase) coding sequence from Lactococcus lactis (SEQ ID NO:180), and the alcohol dehydrogenase coding sequence from E. coli (YqhD) (SEQ ID NO:182).

[0438] Certain embodiments utilize polynucleotides that encode polypeptides associated with the biosynthesis of 4-hydroxybutyrate and/or 1,4-butanediol. For instance, certain embodiments employ one or more alpha-ketoglutarate decarboxylase encoding polynucleotides, including CCDC5180_{—}0513 (SEQ ID NO:199) from Mycobacterium bovis and SYNPCC7002_A2770 (SEQ ID NO:201) from Synechococcus sp PCC 7002. Some embodiments employ one or more 4-hydroxybutyrate dehydrogenase encoding polynucleotides, including PGN_{—}0724 (SEQ ID NO:203) from Porphyromonas gingivalis and CKR_{—}2662 (SEQ ID NO:205) from Clostridium kluyveri. Particular embodiments employ one or more succinyl-CoA synthetase encoding polynucleotides, such as the alpha subunit sucC (b0728) (SEQ ID NO:213) from E. coli and the beta subunit sucD (b0729) (SEQ ID NO:215) from E. coli. Some embodiments utilize one or more succinate-semialdehyde dehydrogenase encoding polynucleotides, such as PGTDC60_{—}1813 (SEQ ID NO:217) from Porphyromonas gingivalis. Examples of 4-hydroxybutyryl-CoA transferase encoding polynucleotides include cat2 (CKR_{—}2666) (SEQ ID NO:207) from Clostridium kluyveri, and homologs from Clostridium aminobutyricum and Porphyromonas gingivalis. Particular examples of aldehyde/alcohol dehydrogenase encoding polynucleotides include adhE2 (CEA_P0034) (SEQ ID NO:209) from Clostridium acetobutylicum and adhE (b1241) (SEQ ID NO:211) from E. coli.

[0439] Certain embodiments employ polynucleotides that encode polypeptides associated with the biosynthesis of polyamines or intermediates thereof. Examples include polynucleotides that encode an arginine decarboxylase to convert L-arginine into agmatine, an agmatine deiminase to convert agmatine into N-carbamoylputrescine, and an N-carbamoylputrescine amidase to convert N-carbamoylputrescine into putrescine. One example of an arginine decarboxylase encoding polynucleotide is Synpcc7942_{—}1037 (SEQ ID NO:219) from S. elongatus PCC7942. Specific examples of agmatine deiminase encoding polynucleotides include Synpcc7942_{—}2402 (SEQ ID NO:221) and Synpcc7942_{—}2461 from S. elongatus PCC7942. One exemplary N-carbamoylputrescine amidase encoding polynucleotide is Synpcc7942_{—}2145 (SEQ ID NO:223) from S. elongatus PCC7942.

[0440] Exemplary nucleotide sequences that encode the proteins and enzymes of the application encompass full-length reference polypeptides described herein (e.g., full-length acyl-ACP reductases, ACPs, glycyogen breakdown proteins, ACCases, DGATs, fatty acyl-CoA synthetases, aldehyde dehydrogenases, alcohol dehydrogenases), as well as portions of the full-length or substantially full-length nucleotide sequences of these genes or their transcripts or DNA copies of these transcripts. Portions of a nucleotide sequence may encode polypeptide portions or segments that retain the biological activity of the reference polypeptide. A portion of a nucleotide sequence that encodes a biologically active fragment of an enzyme provided herein may encode at least about 20, 21, 22, 23, 24, 25, 30, 40, 50, 60, 70, 80, 90, 100, 120, 150, 200, 300, 400, 500, 600, or more contiguous amino acid residues, almost up to the total number of amino acids present in a full-length enzyme. It will be readily understood that “intermediate lengths,” in this context and in all other contexts used herein, means any length between the quoted values, such as 101, 102, 103, etc.; 151, 152, 153, etc.; 201, 202, 203, etc.

[0441] The polynucleotides of the present invention, regardless of the length of the coding sequence itself, may be combined with other DNA sequences, such as promoters, polyadenylation signals, additional restriction enzyme sites, multiple cloning sites, other coding segments, and the like, such that their overall length may vary considerably. It is therefore contemplated that a polynucleotide fragment of almost any length may be employed, with the total length preferably being limited by the ease of preparation and use in the intended recombinant DNA protocol.

[0442] The invention also contemplates variants of the nucleotide sequences of the polypeptides described herein (e.g., acyl-ACP reductases, ACPs, DGATs, glycogen breakdown proteins, fatty acyl-CoA synthetases, aldehyde dehydrogenases, alcohol dehydrogenases, ACCases). Nucleic acid variants can be naturally-occurring, such as allelic variants (same locus), homologs (different locus), and orthologs (different organism) or can be non naturally-occurring. Naturally occurring variants such as these can be identified and isolated using well-known molecular biology techniques including, for example, various polymerase chain reaction (PCR) and hybridization-based techniques as known in the art. Naturally occurring variants can be isolated from any organism that encodes one or more genes having an activity of interest, such as a glycogen synthesis/storage associated activity, glycogen breakdown activity, acyl-ACP reductase activity, ACP activity, DGAT, fatty acyl-CoA synthetase, aldehyde dehydrogenase, and/or an acetyl-CoA carboxylase activity. Embodiments of the present invention, therefore, encompass Cyanobacteria comprising such naturally occurring polynucleotide variants.

[0443] Non-naturally occurring variants can be made by mutagenesis techniques, including those applied to polynucleotides, cells, or organisms. The variants can contain nucleotide substitutions, deletions, inversions and insertions. Variation can occur in either or both the coding and non-coding regions. In certain aspects, non-naturally occurring variants may have been optimized for use in Cyanobacteria, such as by engineering and screening the enzymes for increased activity, stability, or any other desirable feature. The variations can produce both conservative and non-conservative amino acid substitutions (as compared to the originally encoded product). For nucleotide sequences, conservative variants include those sequences that, because of the degeneracy of the genetic code, encode the amino acid sequence of a reference polypeptide. Variant nucleotide sequences also include synthetically derived nucleotide sequences, such as those generated, for example, by using site-directed mutagenesis but which still encode a biologically active polypeptide described herein, including but not limited to polypeptides having an acyl-ACP reductase activity, an ACP activity, glycogen breakdown activity, DGAT activity, fatty acyl-CoA synthetase activity, aldehyde dehydrogenase activity, alcohol dehydrogenase, and/or an acetyl-CoA carboxylase activity. Generally, variants of a particular reference nucleotide sequence will have at least about 30%, 40% 50%, 55%, 60%, 65%, 70%, generally at least about 75%, 80%, 85%, 90%, 95% or 98% or more sequence identity to that particular nucleotide sequence as determined by sequence alignment programs described elsewhere herein using default parameters.

[0444] Known reference nucleotide sequences can be used to isolate corresponding sequences and alleles from other organisms, particularly other microorganisms. Methods are readily available in the art for the hybridization of nucleic acid sequences. Coding sequences from other organisms may be isolated according to well known techniques based on their sequence identity with the coding sequences set forth herein. In these techniques all or part of the known coding sequence is used as a probe which selectively hybridizes to other reference coding sequences present in a population of cloned genomic DNA fragments or cDNA fragments (i.e., genomic or cDNA libraries) from a chosen organism.

[0445] Accordingly, the present invention also contemplates polynucleotides that hybridize to reference nucleotide sequences, or to their complements, under stringency conditions described below. As used herein, the term “hybridizes under low stringency, medium stringency, high stringency, or very high stringency conditions” describes conditions for hybridization and washing. Guidance for performing hybridization reactions can be found in Ausubel et al., (1998, supra), Sections 6.3.1-6.3.6. Aqueous and non-aqueous methods are described in that reference and either can be used.

[0446] Reference herein to “low stringency” conditions include and encompass from at least about 1% v/v to at least about 15% v/v formamide and from at least about 1 M to at least about 2 M salt for hybridization at 42° C., and at least about 1 M to at least about 2 M salt for washing at 42° C. Low stringency conditions also may include 1% Bovine Serum Albumin (BSA), 1 mM EDTA, 0.5 M NaHPO₄ (pH 7.2), 7% SDS for hybridization at 65° C., and (i) 2×SSC, 0.1% SDS; or (ii) 0.5% BSA, 1 mM EDTA, 40 mM NaHPO₄ (pH 7.2), 5% SDS for washing at room temperature. One embodiment of low stringency conditions includes hybridization in 6× sodium chloride/sodium citrate (SSC) at about 45° C., followed by two washes in 0.2×SSC, 0.1% SDS at least at 50° C. (the temperature of the washes can be increased to 55° C. for low stringency conditions).

[0447] “Medium stringency” conditions include and encompass from at least about 16% v/v to at least about 30% v/v formamide and from at least about 0.5 M to at least about 0.9 M salt for hybridization at 42° C., and at least about 0.1 M to at least about 0.2 M salt for washing at 55° C. Medium stringency conditions also may include 1% Bovine Serum Albumin (BSA), 1 mM EDTA, 0.5 M NaHPO₄ (pH 7.2), 7% SDS for hybridization at 65° C., and (i) 2×SSC, 0.1% SDS; or (ii) 0.5% BSA, 1 mM EDTA, 40 mM NaHPO₄ (pH 7.2), 5% SDS for washing at 60-65° C. One embodiment of medium stringency conditions includes hybridizing in 6×SSC at about 45° C., followed by one or more washes in 0.2×SSC, 0.1% SDS at 60° C.

[0448] “High stringency” conditions include and encompass from at least about 31% v/v to at least about 50% v/v formamide and from about 0.01 M to about 0.15 M salt for hybridization at 42° C., and about 0.01 M to about 0.02 M salt for washing at 55° C. High stringency conditions also may include 1% BSA, 1 mM EDTA, 0.5 M NaHPO₄ (pH 7.2), 7% SDS for hybridization at 65° C., and (i) 0.2×SSC, 0.1% SDS; or (ii) 0.5% BSA, 1 mM EDTA, 40 mM NaHPO₄ (pH 7.2), 1% SDS for washing at a temperature in excess of 65° C. One embodiment of high stringency conditions includes hybridizing in 6×SSC at about 45° C., followed by one or more washes in 0.2×SSC, 0.1% SDS at 65° C.

[0449] In certain embodiments, a acyl-ACP reductase, ACP, glycogen breakdown protein, aldehyde dehydrogenase, alcohol dehydrogenase, alcohol dehydrogenase, and/or acetyl-CoA carboxylase enzyme (or other enzyme described herein) is encoded by a polynucleotide that hybridizes to a disclosed nucleotide sequence under very high stringency conditions. One embodiment of very high stringency conditions includes hybridizing in 0.5 M sodium phosphate, 7% SDS at 65° C., followed by one or more washes in 0.2×SSC, 1% SDS at 65° C.

[0450] Other stringency conditions are well known in the art and the skilled artisan will recognize that various factors can be manipulated to optimize the specificity of the hybridization. Optimization of the stringency of the final washes can serve to ensure a high degree of hybridization. For detailed examples, see Ausubel et al., supra at pages 2.10.1 to 2.10.16 and Sambrook et al. (1989, supra) at sections 1.101 to 1.104.

[0451] While stringent washes are typically carried out at temperatures from about 42° C. to 68° C., one skilled in the art will appreciate that other temperatures may be suitable for stringent conditions. Maximum hybridization rate typically occurs at about 20° C. to 25° C. below the Tₘ for formation of a DNA-DNA hybrid. It is well known in the art that the Tₘ is the melting temperature, or temperature at which two complementary polynucleotide sequences dissociate. Methods for estimating Tₘ are well known in the art (see Ausubel et al., supra at page 2.10.8).

[0452] In general, the Tₘ of a perfectly matched duplex of DNA may be predicted as an approximation by the formula: Tₘ=81.5+16.6 (log₁₀ M)+0.41 (% G+C)−0.63 (% formamide)−(600/length) wherein: M is the concentration of Na⁺, preferably in the range of 0.01 molar to 0.4 molar; % G+C is the sum of guano sine and cytosine bases as a percentage of the total number of bases, within the range between 30% and 75% G+C; % formamide is the percent formamide concentration by volume; length is the number of base pairs in the DNA duplex. The Tₘ of a duplex DNA decreases by approximately 1° C. with every increase of 1% in the number of randomly mismatched base pairs. Washing is generally carried out at Tₘ−15° C. for high stringency, or Tₘ−30° C. for moderate stringency.

[0453] In one example of a hybridization procedure, a membrane (e.g., a nitrocellulose membrane or a nylon membrane) containing immobilized DNA is hybridized overnight at 42° C. in a hybridization buffer (50% deionized formamide, 5×SSC, 5× Reinhardt's solution (0.1% fecal, 0.1% polyvinylpyrollidone and 0.1% bovine serum albumin), 0.1% SDS and 200 mg/mL denatured salmon sperm DNA) containing a labeled probe. The membrane is then subjected to two sequential medium stringency washes (i.e., 2×SSC, 0.1% SDS for 15 min at 45° C., followed by 2×SSC, 0.1% SDS for 15 min at 50° C.), followed by two sequential higher stringency washes (i.e., 0.2×SSC, 0.1% SDS for 12 min at 55° C. followed by 0.2×SSC and 0.1% SDS solution for 12 min at 65-68° C.

[0454] Polynucleotides and fusions thereof may be prepared, manipulated and/or expressed using any of a variety of well established techniques known and available in the art. For example, polynucleotide sequences which encode polypeptides of the invention, or fusion proteins or functional equivalents thereof, may be used in recombinant DNA molecules to direct expression of a triglyceride or lipid biosynthesis enzyme in appropriate host cells. Due to the inherent degeneracy of the genetic code, other DNA sequences that encode substantially the same or a functionally equivalent amino acid sequence may be produced and these sequences may be used to clone and express a given polypeptide.

[0455] As will be understood by those of skill in the art, it may be advantageous in some instances to produce polypeptide-encoding nucleotide sequences possessing non-naturally occurring codons. For example, codons preferred by a particular prokaryotic or eukaryotic host can be selected to increase the rate of protein expression or to produce a recombinant RNA transcript having desirable properties, such as a half-life which is longer than that of a transcript generated from the naturally occurring sequence. Such nucleotides are typically referred to as “codon-optimized.”

[0456] Moreover, the polynucleotide sequences of the present invention can be engineered using methods generally known in the art in order to alter polypeptide encoding sequences for a variety of reasons, including but not limited to, alterations which modify the cloning, processing, expression and/or activity of the gene product.

[0457] In order to express a desired polypeptide, a nucleotide sequence encoding the polypeptide, or a functional equivalent, may be inserted into appropriate expression vector, i.e., a vector that contains the necessary elements for the transcription and translation of the inserted coding sequence. Methods which are well known to those skilled in the art may be used to construct expression vectors containing sequences encoding a polypeptide of interest and appropriate transcriptional and translational control elements. These methods include in vitro recombinant DNA techniques, synthetic techniques, and in vivo genetic recombination. Such techniques are described in Sambrook et al., Molecular Cloning, A Laboratory Manual (1989), and Ausubel et al., Current Protocols in Molecular Biology (1989).

[0458] A variety of expression vector/host systems are known and may be utilized to contain and express polynucleotide sequences. In certain embodiments, the polynucleotides of the present invention may be introduced and expressed in Cyanobacterial systems. As such, the present invention contemplates the use of vector and plasmid systems having regulatory sequences (e.g., promoters and enhancers) that are suitable for use in various Cyanobacteria (see, e.g., Koksharova et al. Applied Microbiol Biotechnol 58:123-37, 2002). For example, the promiscuous RSF1010 plasmid provides autonomous replication in several Cyanobacteria of the genera Synechocystis and Synechococcus (see, e.g., Mermet-Bouvier et al., Curr Microbiol 26:323-327, 1993). As another example, the pFC1 expression vector is based on the promiscuous plasmid RSF1010. pFC1 harbors the lambda cl857 repressor-encoding gene and pR promoter, followed by the lambda cro ribosome-binding site and ATG translation initiation codon (see, e.g., Mermet-Bouvier et al., Curr Microbiol 28:145-148, 1994). The latter is located within the unique Ndel restriction site (CATATG) of pFC1 and can be exposed after cleavage with this enzyme for in-frame fusion with the protein-coding sequence to be expressed.

[0459] The “control elements” or “regulatory sequences” present in an expression vector (or employed separately) are those non-translated regions of the vector—enhancers, promoters, 5′ and 3′ untranslated regions—which interact with host cellular proteins to carry out transcription and translation. Such elements may vary in their strength and specificity. Depending on the vector system and host utilized, any number of suitable transcription and translation elements, including constitutive and inducible promoters, may be used. Generally, it is well-known that strong E. coli promoters work well in Cyanobacteria. Also, when cloning in Cyanobacterial systems, inducible promoters such as the hybrid lacZ promoter of the PBLUESCRIPT phagemid (Stratagene, La Jolla, Calif.) or PSPORT1 plasmid (Gibco BRL, Gaithersburg, Md.) and the like may be used. Other vectors containing IPTG inducible promoters, such as pAM1579 and pAM2991trc, may be utilized according to the present invention.

[0460] Certain embodiments may employ a temperature inducible system or temperature inducible regulatory sequences (e.g., promoters, enhancers, repressors). As one example, an operon with the bacterial phage left-ward promoter (PO and a temperature sensitive repressor gene C1857 may be employed to produce a temperature inducible system for producing fatty acids and/or triglycerides in Cyanobacteria (see, e.g., U.S. Pat. No. 6,306,639, herein incorporated by reference). It is believed that at a non-permissible temperature (low temperature, 30 degrees Celsius), the repressor binds to the operator sequence, and thus prevents RNA polymerase from initiating transcription at the P_{L} promoter. Therefore, the expression of encoded gene or genes is repressed. When the cell culture is transferred to a permissible temperature (37-42 degrees Celsius), the repressor cannot bind to the operator. Under these conditions, RNA polymerase can initiate the transcription of the encoded gene or genes.

[0461] In Cyanobacterial systems, a number of expression vectors or regulatory sequences may be selected depending upon the use intended for the expressed polypeptide. When large quantities are needed, vectors or regulatory sequences which direct high level expression of encoded proteins may be used. For example, overexpression of ACCase enzymes may be utilized to increase fatty acid biosynthesis. Such vectors include, but are not limited to, the multifunctional E. coli cloning and expression vectors such as BLUESCRIPT (Stratagene), in which the sequence encoding the polypeptide of interest may be ligated into the vector in frame with sequences for the amino-terminal Met and the subsequent 7 residues of (3-galactosidase so that a hybrid protein is produced; pIN vectors (Van Heeke & Schuster, J. Biol. Chem. 264:5503 5509 (1989)); and the like. pGEX Vectors (Promega, Madison, Wis.) may also be used to express foreign polypeptides as fusion proteins with glutathione S-transferase (GST).

[0462] Certain embodiments may employ Cyanobacterial promoters or regulatory operons. In certain embodiments, a promoter may comprise an rbcLS operon of Synechococcus, as described, for example, in Ronen-Tarazi et al. (Plant Physiology 18:1461-1469, 1995), or a cpc operon of Synechocystis sp. strain PCC 6714, as described, for example, in Imashimizu et al. (J Bacteriol. 185:6477-80, 2003). In certain embodiments, the tRNApro gene from Synechococcus may also be utilized as a promoter, as described in Chungjatupornchai et al. (Curr Microbiol. 38:210-216, 1999). Certain embodiments may employ the nirA promoter from Synechococcus sp. strain PCC7942, which is repressed by ammonium and induced by nitrite (see, e.g., Maeda et al., J. Bacteriol. 180:4080-4088, 1998; and Qi et al., Applied and Environmental Microbiology 71:5678-5684, 2005). The efficiency of expression may be enhanced by the inclusion of enhancers which are appropriate for the particular Cyanobacterial cell system which is used, such as those described in the literature.

[0463] In certain embodiments, expression vectors or introduced promoters utilized to overexpress an exogenous or endogenous acyl-ACP reductase, ACP, DGAT, fatty acyl-CoA synthetase, glycogen breakdown protein, aldehyde dehydrogenase, alcohol dehydrogenase, and/or acetyl-CoA carboxylase, or fragment or variant thereof, comprise a weak promoter under non-inducible conditions, e.g., to avoid toxic effects of long-term overexpression of any of these polypeptides. One example of such a vector for use in Cyanobacteria is the pBAD vector system. Expression levels from any given promoter may be determined, e.g., by performing quantitative polymerase chain reaction (qPCR) to determine the amount of transcript or mRNA produced by a promoter, e.g., before and after induction. In certain instances, a weak promoter is defined as a promoter that has a basal level of expression of a gene or transcript of interest, in the absence of inducer, that is ≦2.0% of the expression level produced by the promoter of the rnpB gene in S. elongatus PCC7942. In other embodiments, a weak promoter is defined as a promoter that has a basal level of expression of a gene or transcript of interest, in the absence of inducer, that is ≦5.0% of the expression level produced by the promoter of the rnpB gene is S. elongatus PCC7942.

[0464] It will be apparent that further to their use in vectors, any of the regulatory elements described herein (e.g., promoters, enhancers, repressors, ribosome binding sites, transcription termination sites) may be introduced directly into the genome of a photosynthetic microorganism (e.g., Cyanobacterium), typically in a region surrounding (e.g., upstream or downstream of) an endogenous or naturally-occurring gene such as an acyl-ACP reductase (e.g., orf1594 in Synechococcus elongatus), an ACP, or an ACCase, to regulate expression (e.g., facilitate overexpression) of that gene.

[0465] Specific initiation signals may also be used to achieve more efficient translation of sequences encoding a polypeptide of interest. Such signals include the ATG initiation codon and adjacent sequences. In cases where sequences encoding the polypeptide, its initiation codon, and upstream sequences are inserted into the appropriate expression vector, no additional transcriptional or translational control signals may be needed. However, in cases where only coding sequence, or a portion thereof, is inserted, exogenous translational control signals including the ATG initiation codon should be provided. Furthermore, the initiation codon should be in the correct reading frame to ensure translation of the entire insert. Exogenous translational elements and initiation codons may be of various origins, both natural and synthetic.

[0466] A variety of protocols for detecting and measuring the expression of polynucleotide-encoded products, using either polyclonal or monoclonal antibodies specific for the product are known in the art. Examples include enzyme-linked immunosorbent assay (ELISA), radioimmunoassay (RIA), and fluorescence activated cell sorting (FACS). These and other assays are described, among other places, in Hampton et al., Serological Methods, a Laboratory Manual (1990) and Maddox et al., J. Exp. Med. 158:1211-1216 (1983). The presence of a desired polynucleotide, such as an acyl-ACP reductase, ACP, glycogen breakdown protein, and/or an acetyl-CoA carboxylase encoding polypeptide, may also be confirmed by PCR.

[0467] A wide variety of labels and conjugation techniques are known by those skilled in the art and may be used in various nucleic acid and amino acid assays. Means for producing labeled hybridization or PCR probes for detecting sequences related to polynucleotides include oligolabeling, nick translation, end-labeling or PCR amplification using a labeled nucleotide. Alternatively, the sequences, or any portions thereof may be cloned into a vector for the production of an mRNA probe. Such vectors are known in the art, are commercially available, and may be used to synthesize RNA probes in vitro by addition of an appropriate RNA polymerase such as T7, T3, or SP6 and labeled nucleotides. These procedures may be conducted using a variety of commercially available kits. Suitable reporter molecules or labels, which may be used include radionuclides, enzymes, fluorescent, chemiluminescent, or chromogenic agents as well as substrates, cofactors, inhibitors, magnetic particles, and the like.

[0468] Cyanobacterial host cells transformed with a polynucleotide sequence of interest may be cultured under conditions suitable for the expression and recovery of the protein from cell culture. The protein produced by a recombinant cell may be secreted or contained intracellularly depending on the sequence and/or the vector used. As will be understood by those of skill in the art, expression vectors containing polynucleotides of the invention may be designed to contain signal sequences which direct localization of the encoded polypeptide to a desired site within the cell. Other recombinant constructions may be used to join sequences encoding a polypeptide of interest to nucleotide sequence encoding a polypeptide domain which will direct secretion of the encoded protein.

[0469] In particular embodiments of the present invention, a modified photosynthetic microorganism of the present invention has reduced expression of one or more genes selected from glucose-1-phosphate adenyltransferase (glgC), phosphoglucomutase (pgm), and/or glycogen synthase (glgA). In particular embodiments, the modified photosynthetic microorganism comprises a mutation of one or more of these genes. Specific glgC, pgm, and glgA sequences may be mutated or modified, or targeted to reduce expression.

[0470] Examples of such glgC polynucleotide sequences are provided in SEQ ID NOs:28 (Synechocystis sp. PCC6803), 34 (Nostoc sp. PCC 7120), 33 (Anabaena variabilis), 32 (Trichodesmium erythraeum IMS 101), 27 (Synechococcus elongatus PCC7942), 30 (Synechococcus sp. WH8102), 31 (Synechococcus sp. RCC 307), and 29 (Synechococcus sp. PCC 7002), which respectively encode GlgC polypeptides having sequences set forth in SEQ ID NOs: 86, 87, 88, 89, 90, 91, 92, and 93.

[0471] Examples of such pgm polynucleotide sequences are provided in SEQ ID NOs: 25 (Synechocystis sp. PCC6803), 75 (Synechococcus elongatus PCC7942), 26 (Synechococcus sp. WH8102), 78 (Synechococcus RCC307), and 80 (Synechococcus 7002), which respectively encode Pgm polypeptides having sequences set forth in SEQ ID NOs:74, 76, 77, 79 and 81.

[0472] Examples of such glgA polynucleotide sequences are provided in SEQ ID NOs:36 (Synechocystis sp. PCC6803), 42 (Nostoc sp. PCC 7120), 41 (Anabaena variabilis), 40 (Trichodesmium erythraeum IMS 101), 35 (Synechococcus elongatus PCC7942), 38 (Synechococcus sp. WH8102), 39 (Synechococcus sp. RCC 307), and 37 (Synechococcus sp. PCC 7002), which respectively encode GlgA polypeptides having sequences set forth in SEQ ID NOs:94, 95, 96, 97, 98, 99, 100 and 101.

[0473] In particular embodiments of the present invention, a modified photosynthetic microorganism of the present invention has reduced expression of one or more endogenous aldehyde decarbonylases. One example of an aldehyde decarbonylase is encoded by orf1953 is S. elongatus PCC7942. Another example is an aldehyde decarbonylase encoded by orfsll0208 in Synechocystis sp. PCC6803. In particular embodiments, a modified photosynthetic microorganism of the present invention has reduced expression of one or more endogenous acyl-ACP synthetases (Aas). One example is encoded by Aas of S. elongatus PCC7942. In some embodiments, a modified photosynthetic microorganism has reduced expression of one or more endogenous aldehyde dehydrogenases. One example is encoded by orf0489 of Synechococcus elongatus PCC7942.

### EXAMPLES

### Example 1

### Generation of Glycogen Synthesis Mutants

[0474] Glycogen synthesis mutants (ΔglgC and ΔglgA) were prepared as described, for example, in U.S. Application No. 2010/0184169 and WO/2010/075440. Briefly, the glucose-1-phosphate adenylyltransferase gene (Synpcc7942_{—}0603, glgC) and the UDP-glucose-glycogen glucosyltransferase gene (Synpcc7942_{—}2518, glgA) in the S. elongatus PCC 7942 strain were individually inactivated by deletion to generate two different modified S. elongatus strains, ΔglgC and ΔglgA.

[0475] The ΔglgC and ΔglgA deletion strains were constructed as follows. Polymerase chain reaction was used to amplify genomic DNA regions flanking the glgC and glgA genes. Amplified upstream and downstream flanking regions were sequentially cloned upstream and downstream of the gentamicin resistance marker in plasmid pCRG. The pCRG plasmid is not capable of autonomous replication in Synechococcus.

[0476] The resulting plasmids were individually transformed into S. elongatus PCC 7942 using established methods. Following selection on gentamicin-containing medium, recombinant strains were propagated and their genomic DNA analyzed by PCR to verify deletion of the targeted gene in the respective ΔglgC and ΔglgA deletion strains. Strains, plasmids, primer sequences, vector construction, and primer sequences may be found in Tables C, D and E.

TABLE C

| Strain | Relevant phenotype or genotype |
|---|---|
| S. elongatus | |
| S. elongatus | Wild-type strain |
| PCC 7942 | |
| ΔglgC | Wild type derivative; deletion of 831 bp of glgC |
| | replaced by ~1 kb Gm^{r} cartridge |
| E. coli | |
| DH5α | supE44 ΔlacU169 (φ80 lacZΔM15) hsdR178 recA1 |
| | endA1 gyrA96 thi-1 relA1 |

TABLE D

| Plasmid | Construction |
|---|---|
| pAM2314 | Spec^{r}Strep^{r}, Ap^{r}; Neutral site 1 |
| | recombination vector |
| pAM2314FTlux | promoterless neutral site 1 recombination |
| | vector containing luxAB from V. harveyi |
| pAM2314FT_PnblA_luxAB | Neutral site 1 recombination vector |
| | containing luxAB under control of the |
| | nblA promoter |
| pAM2314FTtrc3_kgtP | Neutral site 1 recombination vector |
| | containing E. coli kgtP under control of |
| | the P_{trc} promoter |
| pAM1579 | Km^{r}, Ap^{r}; Neutral site 2 recombination |
| | vector |
| pAM1579Ftrc3_kgtP | Neutral site 2 recombination vector |
| | containing E. coli kgtP under control of |
| | the P_{trc} promoter |
| pAM1579F | Km^{r}, Ap^{r}; NdeI site of pAM1579 removed |
| | by fill-in and self-ligation |
| pAM1579F-glgC | Km^{r}, Ap^{r}; 1815 bp PCR product |
| | containing glgC and 522 bp upstream |
| | of glgC translational start cloned |
| | into EcoRV-XbaI sites of pAM1579F |
| pAM3558 | Gm^{r}; Neutral site 2 recombination vector |
| pCR2.1-TOPO | Km^{r}, Ap^{r}; TOPO cloning vector |
| pCRG | Km^{r}, Ap^{r}, Gm^{r}; 1012 bp fragment from |
| | pAM3558 cloned into TOPO site of |
| | pCR2.1-TOPO |
| pCRglgA | Km^{r}, Ap^{r}, Gm^{r}; 718 bp PCR fragment |
| | upstream glgC cloned into SpeI-HindIII |
| | sites of pCRG |
| pCRglgAB | Km^{r}, Ap^{r}, Gm^{r}; 720 bp PCR fragment |
| | downstream glgC cloned into NotI-XbaI |
| | sites of pCRglgA |

TABLE D

| Gene | Primer Paris | |
|---|---|---|
| glgA5 | TGAGCCAAGTTGCGGTGCAG | SEQ ID |
| | | NO: 225 |
| glgA3 | CGCGCACTAGTGGAGAGGTTGTAGGTC | SEQ ID |
| | TGAC | NO: 226 |
| glgB5 | GTAGCGCGGCCGCCCTCGGAGCTACGG | SEQ ID |
| | CACCAG | NO: 227 |
| glgB3 | CGCGGTCTAGATACCGGCATAGCGCAG | SEQ ID |
| | TAAG | NO: 228 |
| gent5b | CGATCTCCTGAAGCCAGGGC | SEQ ID |
| | | NO: 229 |
| gent3a | GGCGTTGTGACAATTTACCG | SEQ ID |
| | | NO: 230 |
| glgCUpEcoR | GTTGTTGATATCTGAGCCAAGTTGCGG | SEQ ID |
| Vnew | TGCAG | NO: 231 |
| glgCcompdo | GTTGTTTCTAGATTAGATCACCGTGTT | SEQ ID |
| wnXbaI | GTCGGGAATAACC | NO: 232 |
| glg1 | CGGCACCGAGACACCAATGC | SEQ ID |
| | | NO: 233 |
| glg2 | GCATTGCTTGAGAATGCAGC | SEQ ID |
| | | NO: 234 |
| gent5 | ACATAAGCCTGTTCGGTTCG | SEQ ID |
| | | NO: 235 |
| gent3 | TTAGGTGGCGGTACTTGGGTC | SEQ ID |
| | | NO: 236 |
| NS1inta | GTCGATATCTGGCACGGTGC | SEQ ID |
| | | NO: 237 |
| NS1intb | CATTTCCGATGAGGTCGGTTATC | SEQ ID |
| | | NO: 238 |
| NS2inta | GCGATCGCCGAAGACTGTGAC | SEQ ID |
| | | NO: 239 |
| NS2intb | CGTTGCCGTAGACCAGTTGCTC | SEQ ID |
| | | NO: 240 |
| luxA1 | ACACCTATTAGGTGCGACAG | SEQ ID |
| | | NO: 241 |
| luxA2 | CATGATCGACGGAGGTGATG | SEQ ID |
| | | NO: 242 |
| kgtP_seq_f2 | GAAGTATCTGGTAAATACTGCGGG | SEQ ID |
| | | NO: 243 |
| NS2_rev_a | ACCAATGCTGGGTAGTTCTC | SEQ ID |
| | | NO: 244 |
| nbIA | GCAATAATGCGGCCGCGGCGCTGCCTG | SEQ ID |
| promoter_ | GGAAAGTCAC | NO: 245 |
| fwd | | |
| nbIA | CATTGAACATATGAGCCTCCGGCACTG | SEQ ID |
| promoter_ | CAGATG | NO: 246 |
| rev | | |
| kgtP_F1_Nde | GCAATAATCATATGGCTGAAAGTACTG | SEQ ID |
| | TAAC | NO: 247 |
| kgtP_R1_BgI | CATTGAAAGATCTCTAAAGACGCATCC | SEQ ID |
| | CCTTC | NO: 248 |
| kgtP_int_F1 | CATTAGGCGTTGGTCTGTCGTATGCGG | SEQ ID |
| | TCGCTAATGCTATATTTG | NO: 249 |
| kgtP_int_R1 | CAAATATAGCATTAGCGACCGCATACG | SEQ ID |
| | ACAGACCAACGCCTAATG | NO: 250 |

### Example 2

### Glycogen Synthesis Mutants Maintain Photosynthetic Complexes During Nitrogen Starvation

[0477] Glycogen synthesis mutants (ΔglgC and ΔglgA deletion strains) of S. elongatus PCC 7942 strain were tested for the presence of photosynthetic complexes during nitrogen starvation, relative to wild-type S. elongatus PCC 7942 strain. Wild-type S. elongatus, ΔglgC, and ΔglgA strains were cultured under conditions of nitrogen starvation, and measurements were take of photosynthetic complexes. The results are shown in FIG. 1, where photosynthetic complexes are lost during nitrogen starvation of wild-type S. elongatus, but are not degraded during starvation of glgC or glgA mutants. These data show that photosynthetic complexes are lost during nitrogen starvation of wild-type S. elongatus, but are not degraded during starvation of glgC or glgA mutants, indicating continued photosynthetic activity in glycogen synthesis mutants despite nutrient limitation. In one experiment, cultures of wild type (WT), ΔglgC and ΔglgA were resuspended in either nitrogen replete or 0×N media at a density of 0.25 OD750 and maintained in constant light (50 μE) at 300 C. After 24 hours in culture, spectral scans of each culture measuring absorbance from 350 to 800 nm were obtained to assess photosystem integrity. These data indicate that glycogen synthesis mutants maintain photosynthetic activity despite nutrient limitation.

[0478] NtcA-Transcriptional Activity.

[0479] One key aspect to the regulation of photosynthetic activity is the NtcA-mediated transcriptional response to nitrogen starvation. For instance, NtcA can bind to 2-oxoglutarate and regulate transcription of multiple genes, resulting in the degradation of photosynthetic complexes and the storage of carbon as glycogen. The possible suppression of NtcA-mediated transcriptional response was tested in the ΔglgC strain relative to wild-type.

[0480] Wild-type S. elongatus and ΔglgC strains were cultured under conditions of nitrogen starvation, and transcriptome profiles were obtained for each cell culture. The results are shown in FIGS. 2a-2b, where transcriptome profiling shows suppression of the NtcA-mediated response in the glgC mutant, but not wild-type. With respect to FIG. 2a, wild type and ΔglgC were cultured in 1×N (Replete) or 0.1×N BG11. Total cellular RNA was isolated from each culture at 24 hour intervals for 4 days (D1-D4). Fluorescently labeled cDNA was hybridized to Nimblegen, PCC7942 v2 4x72K high-density gene expression arrays. The data is expressed as the log₂ ratio between the selected gene intensity from the 0.1×N BG11 sample and the gene intensity obtained from the time-matched, strain specific, nitrogen-replete control. The log₂ ratios (0.1×N/Replete) of selected NtcA-regulated, nitrogen-responsive transcripts are presented in this ordered gene cluster segmented by gene annotation and strain. WT=wild type, D1-D4 refers to days 1 to 4 in culture. With respect to FIG. 2b, wild type and ΔglgC were cultured in 1×N (Replete) or 0.1×N BG11. Total cellular RNA was isolated from each culture at 24 hour intervals for 4 days. Fluorescently labeled cDNA was hybridized to Nimblegen, PCC7942 v2 4x72K high-density gene expression arrays. The data is expressed as the log₂ ratio between the selected gene intensity from the 0.1×N BG11 sample and the gene intensity obtained from the time-matched, strain specific, nitrogen-replete control. The log₂ ratios (0.1×N/Replete) of NtcA-regulated, nitrogen-responsive transcripts nblA, gifA, glnA, and nirA are presented.

[0481] Suppression of the NtcA-mediated transcriptional response, which would otherwise degrade photosynthetic complexes, further indicates that glycogen synthesis mutants maintain photosynthetic activity despite nutrient limitation.

[0482] Quantitiative PCR was used to measure the induction and maintenance of nblA expression in response to nitrogen deprivation of both wild type and glgC null cells. While a significant increase in nblA transcript was detected in both wild type and glgC null cells one hour after nitrogen removal, the continued accumulation of nblA transcript detected in wild type by 24 hours did not occur in glgC null cells. Transcript levels for nblA in glgC null cells were actually less than one tenth that of wild type after 8 hours of nitrogen stress (FIG. 4). In one experiment, cultures were maintained in constant light at 30° C. and total cellular RNA was obtained from each culture at the indicated times after resuspension. RNA was converted to cDNA and relative nblA transcript levels were assessed by quantitative PCR. RNA input for each sample was normalized to rnpB, and nblA expression is presented as the fold change in expression compared to the time-matched, strain specific, nitrogen replete control. Moreover, 2-oxoglutarate accumulation and excretion from nitrogen starved ΔglgC coincided temporally with attenuation of nblA transcript levels in response to nitrogen deprivation (FIGS. 3 and 4). Furthermore, the initial induction of nblA transcript in nitrogen deprived glgC null cells was observed 30 minutes after nitrogen removal compared to 1 hour in wild type (FIG. 4). This faster induction of nblA indicates a significant difference in accumulation of 2-oxoglutarate in nitrogen starved glgC null compared to wild type cells.

[0483] The strain WT^{nblA-lux×kgtP} was generated by transforming wild type S. elongatus with a translational fusion of the nblA promoter to a luxAB reporter system and the E. coli 2-oxoglutarate permease, kgtP placed under control of the IPTG inducible P_{trc} promoter. WT^{nblA-lux×kgtP} served as a tool in which the activity of the nblA promoter in response to nitrogen deprivation could be monitored in the presence and absence of 2-oxoglutarate internalization. While the expression of KgtP did not alter the activity of nblA-luxAB in response to nitrogen deprivation (FIGS. 5a and 5b) incubation of IPTG-induced WT^{nblA-lux×kgtP} in 0×N media containing 1 mM 2-oxoglutarate delayed the induction of nblA-luxAB, reduced the magnitude of nblA-luxAB luminescence (FIG. 5b), and delayed the onset of phycobilisome degradation (FIG. 5c). In one experiment, cultures in triplicate of (FIG. 5a) wild type WT^{nblA-lux} and (FIG. 5b) WT^{nblA-lux×kgtP} were seeded at an OD_{750/ml} of 0.4 and were maintained in constant light (50 μE) at 30° C. for 24 hours in replete media buffered at pH 7.5 with 20 mM HEPES containing 1 mM IPTG. At the end of the 24 hour induction period cultures were pelleted and resuspended to an OD_{750/ml} of 0.3 in HEPES buffered media into the following three conditions: 1) Replete media+1 mM IPTG, 2) 0×N media+1 mM IPTG, 3) 0×N media+1 mM IPTG and 1 mM α-ketoglutaric acid potassium salt (20G). Luminescence was measured at the indicated times using culture samples normalized to 0.2 OD_{750/ml}. Data is presented as the average fold change in luminescence (0×N/replete). Errors bars represent standard deviation of the mean fold change in Luminescence. FIG. 5c shows spectral scans of kgtP expressing cultures measuring absorbance from 350 to 800 nm were obtained to assess photosystem integrity at 12 and 24 hours after nitrate removal.

[0484] Chlorophyll A (chlA) levels were determined by the absorbance of cultures at 680 nm wavelength normalized to the optical density of the culture read at 750 nm (680 nm/750 nm). Relative chlA levels were then determined by setting WT under nitrogen replete growth conditions at day 0 as 100% chlA. The results are shown in FIG. 6, where wild-type S. elongatus showed near total loss of chlA by about 1 week of culture under nitrogen starvation, and ΔglgC strain maintained at least 20% chlA levels (relative to WT under non-stress conditions) even after three weeks. In one experiment, cultures of wild type (WT) and ΔglgC were resuspended in either nitrogen replete or 0×N media at a density of 0.25 OD₇₅₀ and maintained in constant light (50 μE) at 30° C. Spectral scans of each culture measuring absorbance from 350 to 800 nm were obtained to assess chlorophyll a levels at the indicated times. Data is expressed as the % of wild type chlorophyll a levels under non-stress (nitrogen replete) conditions.

[0485] An S. elongatus mutant lacking the glgC gene (Synpcc7942_{—}0603) was generated to examine the significance of glycogen synthesis as a component of the global nitrogen starvation response. Growth of the wild type in nitrogen-deficient media triggered chlorosis as evidenced by a significant reduction in chlorophyll a and phycobiliprotein content by 24 hours (FIGS. 7a-7b). Chlorosis in the glgC mutant was severely impaired after 24 hours of nitrogen starvation (FIGS. 7a-7b). Furthermore, while 4 days of nitrogen stress induced the complete loss of both chlorophyll a and phycobiliprotein in wild type, it took twice as long for nitrogen starvation to render the glgC mutant completely chlorotic. In one experiment, cultures of wild type (WT) (FIG. 7a) and ΔglgC (FIG. 7b) were resuspended in either nitrogen replete or 0×N media at a density of 0.25 OD₇₅₀ and maintained in constant light (50 μE) at 30° C. After 24 hours in culture, spectral scans of each culture measuring absorbance from 350 to 800 nm were obtained to assess photosystem integrity.

[0486] Attenuation of chlorosis was not specific to the glgC mutant as a glgA mutant lacking glycogen synthase activity exhibited a similar non-bleaching phenotype in response to nitrogen starvation (FIG. 8). In one experiment, An actively growing culture of glgA null cells (ΔglgA) was resuspended in either replete or 0×N media at a density of 0.25 OD750 and maintained in constant light (50 μE) at 300 C. After 24 hours in culture, spectral scans of each culture measuring absorbance from 350 to 800 nm were obtained to assess photosystem integrity.

[0487] Growth of the wild type continued for approximately one doubling in nitrogen-deficient media after which growth stopped (FIG. 9). However, growth arrest of glgC null cells occurred immediately upon transfer into nitrogen-deficient media (FIG. 9) as did the growth of glgA null cells starved for nitrogen. In one experiment, cultures of wild type (WT) and ΔglgC were resuspended in either nitrogen replete or 0×N media at a density of 0.25 OD₇₅₀ and maintained in constant light (50 μE) at 30° C. The growth of each culture was assessed at the times indicated by measuring culture absorbance at 750 nm.

[0488] In addition, wild type accumulated approximately 50% of its dry weight as glycogen when cultured in nitrogen limited media, while glycogen was not detected in the glgC mutant (FIG. 10). An actively growing culture of glgC null cells (ΔglgC) was resuspended in either nitrogen replete (1×N) or nitrogen limited (0.1×N) media at a density of 0.3 OD750 and maintained in constant light (50 μE) at 300 C. Glycogen levels were assayed after 6 days in culture. The amount of glycogen (4) normalized to cell OD750 is shown. Moreover, the 50% decrease in cellular protein levels observed in nitrogen starved wild type, did not occur in the glgC mutant cells confirming the maintenance of phycobilisomes in the mutant which can constitute up to half of all cellular protein. Notably, phycobilisome maintenance did not have a positive impact on PSII activity as nitrogen stress triggered a similar drop in O₂ evolution rates in both WT and glgC null cells (FIG. 11). In one experiment, cells were grown and washed as described but were resuspended in either BG11 or 0×N BG11 to OD₇₅₀ of 0.35. For oxygen measurements, samples were diluted to OD₇₅₀ of 0.35 in 2 ml in BG11 or 0×N BG11 and supplemented with 10 mM sodium bicarbonate. The sample was sealed in a 1 cm cuvette and illuminated at room temperature with a LED white light source at a PPFD of 50 μmol/m²/s. Oxygen evolution was detected using a NeoFox fluorescent oxygen measuring system (Ocean Optics). A linear increase in oxygen concentration was observed, and the slope of this line was divided by 0.35 to determine oxygen evolution per OD₇₅₀. These phenotypes were complemented by expression of glgC recombined into neutral site 2 (FIGS. 12a-12b). In one experiment, actively growing cultures of wild type (WT) and ΔglgC carrying a glgC transgene (glgC^{TG}) were resuspended in either nitrogen replete or 0×N media at a density of 0.25 OD₇₅₀ and maintained in constant light (50 μE) at 30° C. After 24 hours, spectral scans were obtained (FIG. 12a) and glycogen levels (FIG. 12b) measured for each culture.

[0489] The chlorotic response of the glgC mutant to both sulfur and phosphate stress was evaluated while NtcA is not required for phycobilisome degradation under these stress conditions. Notably, glgC null cells exhibited a non-bleaching phenotype in response to both sulfur and phosphate stress (FIGS. 13a-13d). In one experiment, actively growing cultures of wild type (WT) and glgC null cells (ΔglgC) were resuspended in replete media or media without either sulfur (0×S) or phosphate (0×P) at a density of 0.25 OD₇₅₀ and maintained in constant light (50 μE) at 30° C. Spectral scans were obtained 24 hours after initiation of sulfur starvation and 120 hours after initiation of phosphate starvation.

### Example 3

### Glycogen Synthesis Mutants Secrete Carbon Skeletons and Produce Metabolites that are Convertible into Biofuel End-Products During Nitrogen Starvation

[0490] Glycogen synthesis mutants were tested for their ability to secrete carbon skeletons and produce metabolites that are convertible into biofuel end-products during nitrogen starvation. In one experiment, ΔglgC and ΔglgA deletion strains were cultured under conditions of nitrogen starvation and tested for the secretion of 2-oxoglutarate. The results are shown in FIG. 14, which shows that significant levels of 2-oxoglutarate are secreted each day by the glgC and glgA mutants post nitrogen starvation. In the experiment, cultures of wild type (WT), ΔglgC and ΔglgA were resuspended in either nitrogen replete (1×N) or media depleted entirely of nitrate (0×N) and maintained in constant light at 30° C. for 24, 48 and 72 hours. 2-oxoglutarate level (μg/OD) in the culture media was monitored for each sample by enzymatic assay at the specified times.

[0491] In another experiment, the wild-type S. elongatus and ΔglgC deletion strain were cultured under conditions of nitrogen starvation and tested for secretion of carbon skeletons fumarate, α-ketoglutarate, succinate, reduced glutathione (GSH), and 4-hydroxy-2-oxoglutaric acid. The results are shown in FIGS. 15a-15e, where the ΔglgC strain under nitrogen starvation (Mut 0×) showed significantly increased secretion of each carbon skeleton, relative to wild-type (Wt 1×) and the ΔglgC strain (Mut 1×) under normal conditions, and the wild-type under nitrogen starvation (Wt 0×). In this experiment, cultures of wild type (WT) and ΔglgC (Mut) were resuspended in either nitrogen replete (1×N) or media depleted entirely of nitrate (0×N) and maintained in constant light at 30° C. for 48 hours. Culture supernatant samples were taken 4, 24, and 48 hours after media transfer and prepared by centrifugation and aspiration of the supernatant. Mass spectrometry was used to determine relative levels of metabolites in culture supernatants. Shown are the relative levels of 2-oxoglutarate, fumarate and succinate in culture supernatants over time.

[0492] In another experiment, the wild-type S. elongatus and ΔglgC deletion strain were cultured under conditions of nitrogen starvation and tested for the production of metabolites such as 3-methyl-2-oxovalerate, 3-methyl-2-oxobutyrate, and 4-methyl-2-oxopentanoate, which are convertible into volatile 4- and 5-carbon alcohols that can serve as biofuel end-products. Samples were either centrifuged or filtered prior to testing. The results are shown in FIGS. 16a-16c, where ΔglgC deletion strain (mutant) under conditions of nitrogen starvation produced increased levels of each metabolite tested, relative to wild-type under any conditions (+Nitrogen, −Nitrogen), and relative to the ΔglgC mutant under normal conditions (+Nitrogen). In the experiment, cultures of wild type and ΔglgC were resuspended in either nitrogen replete (1×N) or media depleted entirely of nitrate (0×N). The cultures were maintained in constant light at 30° C. for 4 hrs at which time cells were snap frozen after being harvested either by harvested or after fast filtration in the light. Frozen samples were extracted and subjected to metabolite analysis. Data is normalized to protein in each sample and scaled relative to the median of the specified metabolite in all samples. Box plot details: mean value (+), median value (−), error bars indicate maximum and minimum of data distribution, box plot top and bottom denotes upper and lower quartile of the data.

[0493] In another experiment, the wild-type S. elongatus and ΔglgC deletion strain were cultured under conditions of nitrogen starvation and tested for the production of metabolites such as 3-methyl-2-oxobutyrate, 3-methyl-2-oxovalerate, 4-methyl-2-oxopentanoate, glucose, fumarate, malate, pyruvate, cis-aconitatate and 3-phosphoglycerate. The results are shown in FIGS. 17a-17i, where ΔglgC deletion strain (mutant) under conditions of nitrogen starvation produced increased levels of each metabolite tested, relative to wild-type under any conditions (+Nitrogen, −Nitrogen), and relative to the ΔglgC mutant under normal conditions (+Nitrogen). In the experiment, cultures of wild type and ΔglgC were resuspended in either nitrogen replete (1×N) or media depleted entirely of nitrate (0×N). The cultures were maintained in constant light at 30° C. for 4 hrs at which time cells were snap frozen after being harvested by fast filtration in the light. Frozen samples were extracted and subjected to metabolite analysis. Data is normalized to protein in each sample and scaled as box plots relative to the median of the specified metabolite in all samples. Box plot details: mean value (+), median value (−), error bars indicate maximum and minimum of data distribution, box plot top and bottom denotes upper and lower quartile of the data.

[0494] In another experiment, the wild-type S. elongatus and ΔglgC deletion strain were cultured under conditions of nitrogen starvation and tested for the production of polyamine intermediates such as agmatine and putrescine. The results are shown in FIGS. 18a-18b, where ΔglgC deletion strain (mutant) under conditions of nitrogen starvation produced increased levels of agmatine and putrescine relative to wild-type. In the experiment, cultures were maintained in constant light at 30° C. for 4 hrs at which time cells were snap frozen after being harvested by fast filtration in the light. Frozen samples were extracted and subjected to metabolite analysis. Data is normalized to protein in each sample and scaled as box plots relative to the median of the specified metabolite in all samples. Box plot details: mean value (+), median value (−), error bars indicate maximum and minimum of data distribution, box plot top and bottom denotes upper and lower quartile of the data.

[0495] In another experiment, the metabolite profiles of media obtained from both wild type and ΔglgC cultures grown in the presence or absence of nitrogen were analyzed using mass spectrometry. TCA cycle intermediates succinate, fumarate, and 2-oxoglutarate were observed to accumulate in ΔglgC culture supernatants after transfer to nitrogen free media, with 2-oxoglutarate exhibiting the largest relative change in abundance (FIGS. 19a-19c). In the experiment, cultures of wild type (WT) and ΔglgC were resuspended in either nitrogen replete (1×N) or media depleted entirely of nitrate (0×N) and maintained in constant light at 30° C. for 48 hours. The culture supernatant samples were taken 4, 24, and 48 hours after media transfer and prepared by centrifugation and aspiration of the supernatant. Mass spectrometry was used to determine relative levels of metabolites in culture supernatants. Shown are the relative levels of 2-oxoglutarate, fumarate and succinate in culture supernatants over time. In addition, extracellular 2-oxoglutarate was quantitated at discrete time points following nitrogen starvation. Extracellular accumulation of 2-oxoglutarate from nitrogen starved glgC null cells was first detected 2 hours after nitrogen removal and increased from 30 μM at 2 hours to 90 μM by 24 hours of nitrogen starvation (FIG. 3). In one experiment, cultures of wild type (WT) and ΔglgC were resuspended in either nitrogen replete (1×N) or media depleted entirely of nitrate (0×N) and maintained in constant light at 30° C. for 24 hours. 2-oxoglutarate level (μM) in the culture media was monitored for each sample by enzymatic assay at the specified times. In FIG. 3, data was generated in triplicate and error is expressed as standard deviation of the mean. Samples whose mean fell below the below the 1 μM detection limit of the assay are not graphed.

[0496] In another experiment, mass spectrometry was used to generate metabolic profiles of actively growing wild type and ΔglgC cultures transferred into nitrogen replete or nitrogen deprived media. Relative amounts of intracellular metabolites were determined for wild type and ΔglgC samples 4 hours after media transfer to monitor metabolites immediately after initiation of 2-oxoglutarate excretion. In wild type cells, glucose-6-phosphate and fructose-6-phosphate exhibited a significant increase while glucose levels decreased 4 hours after nitrogen removal compared to nitrogen replete samples (FIG. 20). In the experiment, cultures of wild type and ΔglgC were resuspended in either nitrogen replete (1×N) or media depleted entirely of nitrate (0×N). The cultures were maintained in constant light at 30° C. for 4 hrs at which time cells were harvested, snap frozen and subjected to metabolite analysis. Shown are the Logₑ ratios of indicated metabolites from nitrogen starved cells versus nitrogen replete cells. Metabolites without a reported ratio for the indicated strain were below the detection limit in at least two out of three biological replicates for at least one growth condition. [*]=ratio with a p-value 0.05, [**]=ratio with a p-value 0.01.

[0497] These results show that glycogen synthesis mutant strain(s) maintain photosynthetic capacity even under conditions of nutrient limitation, and can be used, for example, in continuous production systems under such conditions to generate internally accumulating and/or secreted metabolites suitable for conversion to, for example, volatile biofuel products.

[0498] The various embodiments described above can be combined to provide further embodiments. All of the U.S. patents, U.S. patent application publications, U.S. patent applications, foreign patents, foreign patent applications and non-patent publications referred to in this specification and/or listed in the Application Data Sheet are incorporated herein by reference, in their entirety. Aspects of the embodiments can be modified, if necessary to employ concepts of the various patents, applications and publications to provide yet further embodiments.

[0499] These and other changes can be made to the embodiments in light of the above-detailed description. In general, in the following claims, the terms used should not be construed to limit the claims to the specific embodiments disclosed in the specification and the claims, but should be construed to include all possible embodiments along with the full scope of equivalents to which such claims are entitled. Accordingly, the claims are not necessarily limited by the disclosure.

### EXEMPLARY EMBODIMENTS

[0500] The following are exemplary embodiments of the invention.

[0501] 1. A system for producing a carbon-containing compound, comprising:

[0502] (a) a modified photosynthetic microorganism that accumulates a reduced amount of glycogen as compared to the wild-type photosynthetic microorganism; and

[0503] (b) a culture system for culturing said modified photosynthetic microorganism under a stress condition,

[0504] wherein said modified photosynthetic microorganism maintains photosynthetic activity and accumulates reduced biomass when grown under said stress condition as compared to when grown under non-stress conditions.

[0505] 2. The system of embodiment 1, wherein said modified photosynthetic microorganism secretes and/or intracellularly accumulates an increased amount of a carbon-containing compound when grown under said stress condition as compared to when grown under non-stress conditions, or as compared to a corresponding wild-type microorganism grown under said stress condition.

[0506] 3. The system of embodiment 1 or 2, wherein said modified photosynthetic microorganism:

[0507] (a) has reduced expression of one or more genes of a glycogen biosynthesis or storage pathway as compared to the wild-type photosynthetic microorganism;

[0508] (b) comprises one or more introduced polynucleotides encoding a protein that increases glycogen breakdown; and/or

[0509] (c) comprises one or more introduced polynucleotides encoding a protein that increases secretion of a glycogen precursor.

[0510] 4. The system of any one of embodiments 1-3, wherein said stress condition is a reduced level of an essential nutrient.

[0511] 5. The system of embodiment 4, wherein said essential nutrient is selected from at least one of nitrogen, sulfur, and phosphorous.

[0512] 6. A method for producing a carbon-containing compound other than glycogen, comprising culturing in a culture media under a stress condition a modified photosynthetic microorganism that accumulates a reduced amount of glycogen as compared to the wild-type photosynthetic microorganism, wherein said modified photosynthetic microorganism maintains photosynthetic activity and accumulates reduced biomass when grown under said stress condition as compared to when grown under non-stress conditions.

[0513] 7. The method of embodiment 6, wherein said modified photosynthetic microorganism secretes and/or intracellularly accumulates an increased amount of one or more carbon-containing compounds when grown under said stress condition as compared to when grown under non-stress conditions, or as compared to a corresponding wild-type microorganism grown under said stress condition.

[0514] 8. The method of embodiment 6 or 7, wherein said modified photosynthetic microorganism:

[0515] (a) has reduced expression of one or more genes of a glycogen biosynthesis or storage pathway as compared to the wild-type photosynthetic microorganism;

[0516] (b) comprises one or more introduced polynucleotides encoding a protein that increases glycogen breakdown or secretion, and/or

[0517] (c) comprises one or more introduced polynucleotides encoding a protein that increases secretion of a glycogen precursor.

[0518] 9. The method of any one of embodiments 6-8, further comprising harvesting said culture media after said modified photosynthetic organism has been cultured under said stress condition.

[0519] 10. The method of any one of embodiments 6-9, further comprising obtaining said carbon-containing compound from said harvested culture media.

[0520] 11. The method of any one of embodiments 6-10, further comprising harvesting said modified photosynthetic microorganism after it has been cultured under said stress condition.

[0521] 12. The method of embodiment 11, further comprising obtaining said carbon-containing compound from said harvested modified photosynthetic microorganism.

[0522] 13. The method of any one of embodiments 6-12, wherein said stress condition is a reduced level of an essential nutrient.

[0523] 14. The method of embodiment 13, wherein said essential nutrient is selected from at least one of nitrogen, sulfur, and phosphorous.

[0524] 15. The system of embodiment 3 or the method of claim 8, wherein said modified photosynthetic microorganism has reduced expression of one or more genes of a glycogen biosynthesis or storage pathway as compared to the wild-type photosynthetic microorganism, and wherein said one or more genes are selected from the group consisting of: a glucose-1-phosphate adenyltransferase (glgC) gene, a phosphoglucomutase (pgm) gene, and a glycogen synthase (glgA) gene.

[0525] 16. The system or method of embodiment 15, wherein said one or more genes comprise a complete or partial gene deletion.

[0526] 17. The system or method of any one of embodiments 1-16, wherein said photosynthetic microorganism is a Cyanobacterium.

[0527] 18. The system or method of embodiment 17, wherein said Cyanobacterium is a Synechococcus elongatus.

[0528] 19. The system or method of embodiment 18, wherein the Synechococcus elongatus is strain PCC 7942.

[0529] 20. The system or method of embodiment 19, wherein the Cyanobacterium is a salt tolerant variant of Synechococcus elongatus strain PCC 7942.

[0530] 21. The system or method of embodiment 17, wherein said Cyanobacterium is Synechococcus sp. PCC 7002.

[0531] 22. The system or method of embodiment 17, wherein said Cyanobacterium is Synechocystis sp. PCC 6803.

[0532] 23. The system or method of any one of embodiments 1-22, wherein said carbon-containing compound is a lipid.

[0533] 24. The system or method of embodiment 23, wherein said lipid is a fatty acid, optionally a free fatty acid, a triglyceride, a wax ester, a fatty alcohol, or an alkane.

[0534] 25. The system or method of embodiment 23, wherein said carbon-containing compound is one or more of 2-oxoglutarate, pyruvate, malate, fumarate, succinate, 4-hydroxybutyrate, 1,4 butanediol, glutaconic acid, 3-methyl-2-oxobutyrate, 3-methyl-2-oxovalerate, 4-methyl-2-oxopentanoate, isobutaraldehyde, isobutanol, 2-methyl-1-butanol, 3-methyl-2-butanol, isopentanol, glucose, glutathione, 3-phosphoglycerate, cis-aconitate, agmatine, putrescine, or glycyerin.

[0535] 26. The system or method of any one of embodiments 1-25, wherein said photosynthetic microorganism comprises one or more introduced or overexpressed polynucleotides encoding one or more enzymes associated with lipid biosynthesis.

[0536] 27. The system of method of embodiment 26, wherein said one or more enzymes associated with lipid biosynthesis comprises an acyl carrier protein (ACP), acyl ACP synthase (Aas), acyl-ACP reductase, alcohol dehydrogenase, aldehyde dehydrogenase, aldehyde decarbonylase, thioesterase (TES), acetyl coenzyme A carboxylase (ACCase), diacylglycerol acyltransferase (DGAT), phosphatidic acid phosphatase (PAP; or phosphatidate phosphatase), triacylglycerol (TAG) hydrolase, fatty acyl-CoA synthetase, lipase/phospholipase, or any combination thereof.

[0537] 28. The system or method of embodiment 26, wherein said one or more enzymes comprises a diacylglycerol acyltransferase (DGAT), and wherein said carbon-containing compound comprises a triglyceride.

[0538] 29. The system or method of embodiment 28, wherein said one or more enzymes further comprises a phosphatidate phosphatase, acetyl coenzyme A carboxylase (ACCase), acyl carrier protein (ACP), phospholipase B, phospholipase C, fatty acyl Co-A synthetase, or any combination thereof.

[0539] 30. The system or method of embodiment 26, where said one or more enzymes comprises an acyl-ACP reductase.

[0540] 31. The system or method of embodiment 30, wherein said one or more enzymes comprises a DGAT, and wherein said carbon-containing compound comprises a triglyceride.

[0541] 32. The system or method of embodiment 31, wherein said one or more enzymes comprises an aldehyde dehydrogenase.

[0542] 33. The system or method of embodiment 30, wherein said one or more enzymes comprises a DGAT having wax ester synthase activity and an alcohol dehydrogenase, and wherein said carbon-containing compound comprises a wax ester.

[0543] 34. The system or method of embodiment 33, comprising reduced expression of an endogenous aldehyde dehydrogenase.

[0544] 35. The system of method of any of embodiments 31-34, comprising reduced expression of an endogenous aldehyde decarbonylase.

[0545] 36. The system or method of embodiment 30, wherein said one or more enzymes comprises an alcohol dehydrogenase, and wherein said carbon-containing compound comprises a fatty alcohol.

[0546] 37. The system or method of embodiment 36, comprising reduced expression of an endogenous aldehyde decarbonylase, reduced expression of an endogenous aldehyde dehydrogenase, or both.

[0547] 38. The system or method of embodiment 30, wherein said one or more enzymes comprises an aldehyde decarbonylase, and wherein said carbon-containing compound comprises an alkane.

[0548] 39. The system or method of embodiment 38, comprising reduced expression of an endogenous aldehyde dehydrogenase, reduced expression of an endogenous alcohol dehydrogenase, or both.

[0549] 40. The system or method of embodiment 30, wherein said carbon-containing compound is a fatty acid, optionally a free fatty acid.

[0550] 41. The system or method of embodiment 40, wherein said one or more enzymes comprises an aldehyde dehydrogenase.

[0551] 42. The system or method of embodiment 40 or 41, comprising reduced expression of an aldehyde decarbonylase, reduced expression of an endogenous alcohol dehydrogenase, or both.

[0552] 43. A method for providing secretion of glucose from a photosynthetic microorganism, comprising culturing a modified photosynthetic microorganism in a media under a stress condition, wherein said photosynthetic microorganism:

[0553] (a) accumulates a reduced amount of glycogen as compared to the wild-type photosynthetic microorganism, and

[0554] (b) comprises one or more introduced or (over)expressed polynucleotides encoding a glucose permease,

[0555] wherein said modified photosynthetic microorganism maintains photosynthetic activity and accumulates reduced biomass when grown under said stress condition as compared to when grown under non-stress conditions.

[0556] 44. A method of producing isobutanol or isopentanol, comprising culturing a modified photosynthetic microorganism in a media under a stress condition, wherein said photosynthetic microorganism:

[0557] (a) accumulates a reduced amount of glycogen as compared to the wild-type photosynthetic microorganism, and

[0558] (b) comprises one or more introduced or overexpressed polynucleotides encoding one or more polypeptides associated with production of isobutanol or isopentanol,

[0559] wherein said modified photosynthetic microorganism maintains photosynthetic activity and accumulates reduced biomass when grown under said stress condition as compared to when grown under non-stress conditions.

[0560] 45. The method of embodiment 44, wherein said one or more polypeptides of (b) are a gene that converts a 2-keto acid to an aldehyde (2-keto acid decarboxylase), a gene that converts the aldehyde to an alcohol (alcohol dehydrogenase), or both.

[0561] 46. A method of producing 4-hydroxybutyrate, comprising culturing a modified photosynthetic microorganism in a media under a stress condition, wherein said photosynthetic microorganism:

[0562] (a) accumulates a reduced amount of glycogen as compared to the wild-type photosynthetic microorganism, and

[0563] (b) comprises one or more introduced or overexpressed polynucleotides encoding one or more polypeptides associated with production of 4-hydroxybutyrate,

[0564] wherein said modified photosynthetic microorganism maintains photosynthetic activity and accumulates reduced biomass when grown under said stress condition as compared to when grown under non-stress conditions.

[0565] 47. The method of embodiment 46, where said one or more polypeptides of (b) are an alpha ketoglutarate decarboxylase, a 4-hydroxybutyrate dehydrogenase, a succinyl-CoA synthetase, a succinate-semialdehyde dehydrogenase, or any combination thereof.

[0566] 48. The method of embodiment 46 or 47, for producing 1,4-butanediol, wherein said photosynthetic microorganism: (c) further comprises one or more introduced or overexpressed polynucleotides encoding one or more polypeptides associated with production of 1,4-butanediol from 4-hydroxybutyrate.

[0567] 49. The method of embodiment 48, wherein said one or more polypeptides of (c) are a 4-hydroxybutyryl-coA transferase, an aldehyde/alcohol dehydrogenase that is optionally capable of reducing coA-linked substrates to aldehydes/alcohols, or both.

[0568] 50. A method of producing a polyamine intermediate, comprising culturing a modified photosynthetic microorganism in a media under a stress condition, wherein said photosynthetic microorganism:

[0569] (a) accumulates a reduced amount of glycogen as compared to the wild-type photosynthetic microorganism, and

[0570] (b) optionally comprises one or more introduced or overexpressed polynucleotides encoding one or more polypeptides associated with production of a polyamine intermediate,

[0571] wherein said modified photosynthetic microorganism maintains photosynthetic activity and accumulates reduced biomass when grown under said stress condition as compared to when grown under non-stress conditions.

[0572] 51. The method of embodiment 50, where said polyamine intermediate is putrescine or agmatine.

[0573] 52. The method of embodiment 50 or 51, wherein said one or more polypeptides is an arginine decarboxylase, and wherein said polyamine intermediate is agmatine.

[0574] 53. The method of any of embodiments 50-52, wherein said one or more polypeptides is an arginine decarboxylase, an agmatine deiminase, or an N-carbamoylputrescine amidase, or any combination thereof, and wherein said polyamine intermediate is putrescine.

[0575] 54. The method of any of embodiments 6-53, comprising relieving the stress condition when the ratio of absorbance of the culture at 680/750 nm is (or falls to) about 10%-90% of the ratio of a corresponding culture under non-stress conditions, where relieving the stress condition increases photosynthetic activity and/or the ratio of absorbance.

[0576] 55. The method of embodiment 54, where the stress condition comprises reduced level of an essential nutrient, and relieving the stress condition comprises adding (pulsing the culture with) the essential nutrient in an amount sufficient to increase photosynthetic activity and/or the ratio of absorbance.

[0577] 56. The method of embodiment 54 or 55, where said photosynthetic activity increases by at least about 10% relative to photosynthetic activity immediately prior to relief of said stress condition.

[0578] 57. The method of any of embodiments 54-56, where the modified photosynthetic microorganism maintains the increased photosynthetic activity for a substantially longer time than a wild-type photosynthetic microorganism under the same or comparable culture conditions.

[0579] 58. The method of any of embodiments 54-57, where the ratio of absorbance increases to greater than about 90% of the ratio of a corresponding culture under non-stress conditions, where non-stress conditions optionally comprise nutrient replete conditions.

[0580] 59. The method of any of embodiments 54-58, where the modified photosynthetic microorganism culture maintains the increased ratio of absorbance for a substantially longer time than a wild-type photosynthetic microorganism culture under the same or comparable culture conditions.

[0581] 60. The method of any of embodiments 54-57, where following relief of the stress condition and increased photosynthetic activity, the subsequent decrease in photosynthetic activity by the modified photosynthetic microorganism is substantially less than the subsequent decrease in photosynthetic activity by a wild-type photosynthetic microorganism culture under the same or comparable culture conditions.

[0582] 61. The method of any of embodiments 54-60, further comprising repeating the step of relieving the stress condition when the ratio of absorbance falls to about 10%-90% of the ratio of a corresponding culture under non-stress conditions.

[0583] 62. The method of any of embodiments 6-54, comprising relieving the stress condition at about 2, 3, 4, 5, 6, 7, 8, 9, 10, 11, 12, 13, or 14 days following initiation of the stress condition, where relieving the stress condition increases photosynthetic activity.

[0584] 63. The method of embodiment 62, where the stress condition comprises reduced level of an essential nutrient, and relieving the stress condition comprises adding (pulsing the culture with) the essential nutrient in an amount sufficient to increase photosynthetic activity.

[0585] 64. The method of embodiments 62 or 63, where said photosynthetic activity increases by at least about 10% relative to photosynthetic activity immediately prior to relief of said stress condition.

[0586] 65. The method of any of embodiments 62-64, where the modified photosynthetic microorganism maintains the increased photosynthetic activity for a substantially longer time than a wild-type photosynthetic microorganism under the same or comparable culture conditions.

[0587] 66. The method of any of embodiments 62-64, where following relief of the stress condition and increased photosynthetic activity, the subsequent decrease in photosynthetic activity by the modified photosynthetic microorganism is substantially less than the subsequent decrease in photosynthetic activity by a wild-type photosynthetic microorganism under the same or comparable culture conditions.

[0588] 67. The method of any of embodiments 60-66, further comprising repeating the step of relieving the stress condition about every 2, 3, 4, 5, 6, 7, 8, 9, 10, 11, 12, 13, or 14 days following previous relief of the stress condition, where relieving the stress condition increases photosynthetic activity.

[0589] 68. The method of any of embodiments 55-67, where the essential nutrient is selected from at least one of nitrogen, sulfur, and phosphorous.

[0590] 69. The method of embodiment 68, where the essential nutrient is nitrogen.

[0591] 70. The method of embodiment 69, where nitrogen is added in the form of NaNO₃, NH₄Cl, (NH₄)₂SO₄, NH₄HCO₃, CH₄N₂O, KNO₃, or any combination thereof, optionally to achieve a final concentration ranging from about 0.02 mM to about 20 mM.

[0592] 71. The system or method of any of embodiments 1-70, where photosynthetic activity of the modified photosynthetic microorganism under the stress condition is least about 20% of photosynthetic activity of the modified photosynthetic microorganism or the wild-type photosynthetic microorganism under non-stress conditions.

[0593] 72. The system or method of embodiment 71, where photosynthetic activity of the modified photosynthetic microorganism under the stress condition is least about 50% of photosynthetic activity of the modified photosynthetic microorganism or the wild-type photosynthetic microorganism under non-stress conditions.

[0594] 73. The system or method of any of embodiments 1-72, where photosynthetic activity of the modified photosynthetic microorganism under the stress condition is substantially greater than photosynthetic activity of the wild-type photosynthetic microorganism under the stress condition.

[0595] 74. The system or method of embodiment 73, where photosynthetic activity of the modified photosynthetic microorganism under the stress condition is at least about 1.5, 2, 3, 4, 5, 6, 7, 8, 9, 10 or 20-fold greater than photosynthetic activity of the wild-type photosynthetic microorganism under the stress condition.

[0596] 75. The system or method of any of embodiments 71-74, where said photosynthetic activity is measured at about day 2, 3, 4, 5, 6, 7, 8, 9, 10, 11, 12, 13, or 14 post-initiation of the stress condition.

[0597] 76. The system or method of any of embodiments 1-70, where maintenance of photosynthetic activity comprises maintenance of chlorophyll A levels.

[0598] 77. The system or method of embodiment 76, where chlorophyll A levels of the modified photosynthetic microorganism under the stress condition are at least about 20% of chlorophyll A levels of the modified photosynthetic microorganism or the wild-type photosynthetic microorganism under non-stress conditions.

[0599] 78. The system or method of embodiment 77, wherein chlorophyll A levels of the modified photosynthetic microorganism under the stress condition are at least about 50% of chlorophyll A levels of the modified photosynthetic microorganism or the wild-type photosynthetic microorganism under non-stress conditions.

[0600] 79. The system or method of any of embodiments 76-78, where chlorophyll A levels of the modified photosynthetic microorganism under the stress condition are substantially greater than chlorophyll A levels of the wild-type photosynthetic microorganism under the stress condition.

[0601] 80. The system or method of embodiment 79, where chlorophyll A levels of the modified photosynthetic microorganism under the stress condition are at least about 1.5, 2, 3, 4, 5, 6, 7, 8, 9, 10 or 20-fold greater than chlorophyll A levels of the wild-type photosynthetic microorganism under the stress condition.

[0602] 81. The system or method of any of embodiments 76-80, where chlorophyll A levels are measured at about day 2, 3, 4, 5, 6, 7, 8, 9, 10, 11, 12, 13, or 14 post-initiation of the stress condition.

The application's sequence listing, which the Patent Office published only in electronic form, follows.

SEQUENCE LISTING (250 sequences)

SEQ ID NO: 1 - DNA, 1026 bp, Synechococcus elongatus
atgttcggtcttatcggtcatctcaccagtttggagcaggcccgcgacgtttctcgcaggatgggctacgacgaatacgccgatcaaggattggagttttggagtagcgctcctcctcaaatcgttgatgaaatcacagtcaccagtgccacaggcaaggtgattcacggtcgctacatcgaatcgtgtttcttgccggaaatgctggcggcgcgccgcttcaaaacagccacgcgcaaagttctcaatgccatgtcccatgcccaaaaacacggcatcgacatctcggccttggggggctttacctcgattattttcgagaatttcgatttggccagtttgcggcaagtgcgcgacactaccttggagtttgaacggttcaccaccggcaatactcacacggcctacgtaatctgtagacaggtggaagccgctgctaaaacgctgggcatcgacattacccaagcgacagtagcggttgtcggcgcgactggcgatatcggtagcgctgtctgccgctggctcgacctcaaactgggtgtcggtgatttgatcctgacggcgcgcaatcaggagcgtttggataacctgcaggctgaactcggccggggcaagattctgcccttggaagccgctctgccggaagctgactttatcgtgtgggtcgccagtatgcctcagggcgtagtgatcgacccagcaaccctgaagcaaccctgcgtcctaatcgacgggggctaccccaaaaacttgggcagcaaagtccaaggtgagggcatctatgtcctcaatggcggggtagttgaacattgcttcgacatcgactggcagatcatgtccgctgcagagatggcgcggcccgagcgccagatgtttgcctgctttgccgaggcgatgctcttggaatttgaaggctggcatactaacttctcctggggccgcaaccaaatcacgatcgagaagatggaagcgatcggtgaggcatcggtgcgccacggcttccaacccttggcattggcaatttga

SEQ ID NO: 2 - protein, 341 aa, Synechococcus elongatus
MFGLIGHLTSLEQARDVSRRMGYDEYADQGLEFWSSAPPQIVDEITVTSATGKVIHGRYIESCFLPEMLAARRFKTATRKVLNAMSHAQKHGIDISALGGFTSIIFENFDLASLRQVRDTTLEFERFTTGNTHTAYVICRQVEAAAKTLGIDITQATVAVVGATGDIGSAVCRWLDLKLGVGDLILTARNQERLDNLQAELGRGKILPLEAALPEADFIVWVASMPQGVVIDPATLKQPCVLIDGGYPKNLGSKVQGEGIYVLNGGVVEHCFDIDWQIMSAAEMARPERQMFACFAEAMLLEFEGWHTNFSWGRNQITIEKMEAIGEASVRHGFQPLALAI

SEQ ID NO: 3 - DNA, 1023 bp, Synechocystis sp.
atgtttggtcttattggtcatctcacgagtttagaacacgcccaagcggttgctgaagatttaggctatcctgagtacgccaaccaaggcctggatttttggtgttcggctcctccccaagtggttgataattttcaggtgaaaagtgtgacggggcaggtgattgaaggcaaatatgtggagtcttgctttttgccggaaatgttaacccaacggcggatcaaagcggccattcgtaaaatcctcaatgctatggccctggcccaaaaggtgggcttggatattacggccctgggaggcttttcttcaatcgtatttgaagaatttaacctcaagcaaaataatcaagtccgcaatgtggaactagattttcagcggttcaccactggtaatacccacaccgcttatgtgatctgccgtcaggtcgagtctggagctaaacagttgggtattgatctaagtcaggcaacggtagcggtttgtggcgccacgggagatattggtagcgccgtatgtcgttggttagatagcaaacatcaagttaaggaattattgctaattgcccgtaaccgccaaagattggaaaatctccaagaggaattgggtcggggcaaaattatggatttggaaacagccctgccccaggcagatattattgtttgggtggctagtatgcccaagggggtagaaattgcgggggaaatgctgaaaaagccctgtttgattgtggatgggggctatcccaagaatttagacaccagggtgaaagcggatggggtgcatattctcaagggggggattgtagaacattcccttgatattacctgggaaattatgaagattgtggagatggatattccctcccggcaaatgttcgcctgttttgcggaggccattttgctagagtttgagggctggcgcactaatttttcctggggccgcaaccaaatttccgttaataaaatggaggcgattggtgaagcttctgtcaagcatggcttttgccctttagtagctctttag

SEQ ID NO: 4 - protein, 340 aa, Synechocystis sp.
MFGLIGHLTSLEHAQAVAEDLGYPEYANQGLDFWCSAPPQVVDNFQVKSVTGQVIEGKYVESCFLPEMLTQRRIKAAIRKILNAMALAQKVGLDITALGGFSSIVFEEFNLKQNNQVRNVELDFQRFTTGNTHTAYVICRQVESGAKQLGIDLSQATVAVCGATGDIGSAVCRWLDSKHQVKELLLIARNRQRLENLQEELGRGKIMDLETALPQADIIVWVASMPKGVEIAGEMLKKPCLIVDGGYPKNLDTRVKADGVHILKGGIVEHSLDITWEIMKIVEMDIPSRQMFACFAEAILLEFEGWRTNFSWGRNQISVNKMEAIGEASVKHGFCPLVAL

SEQ ID NO: 5 - DNA, 243 bp, Synechococcus elongatus PCC 7942
atgagccaagaagacatcttcagcaaagtcaaagacattgtggctgagcagctgagtgtggatgtggctgaagtcaagccagaatccagcttccaaaacgatctgggagcggactcgctggacaccgtggaactggtgatggctctggaagaggctttcgatatcgaaatccccgatgaagccgctgaaggcattgcgaccgttcaagacgccgtcgatttcatcgctagcaaagctgcctag

SEQ ID NO: 6 - protein, 80 aa, Synechococcus elongatus PCC 7942
MSQEDIFSKVKDIVAEQLSVDVAEVKPESSFQNDLGADSLDTVELVMALEEAFDIEIPDEAAEGIATVQDAVDFIASKAA

SEQ ID NO: 7 - DNA, 261 bp, Acinetobacter sp. ADP1
atgtcgaacctggcggatgagatcaaacaaatgatcattgacgtcctcgctctcgaggatatccaaatccaggatattgatgaaacggcaccgctgttcggggatggtttgggcctggatagtattgacgcgctcgaactcggcctggccttgaaaaagcgctaccacatccatttgaatgccgaatctgacgaaactaagcagcactttcggtccattcagagcctggtgaccctggtggaggcccaacagaaagcttag

SEQ ID NO: 8 - protein, 86 aa, Acinetobacter sp. ADP1
MSNLADEIKQMIIDVLALEDIQIQDIDETAPLFGDGLGLDSIDALELGLALKKRYHIHLNAESDETKQHFRSIQSLVTLVEAQQKA

SEQ ID NO: 9 - DNA, 246 bp, Acinetobacter sp. ADP1
atgttgagtcaggaacacatcctctccacactccgcgaatggatggaggacttgtttgaaatcgagcctgaaaccattcaactggattctaacctgtactcggacctggatgtggatagcattgatgcggtcgatctgattgtcaagatcaaagagctcacgggcaaacaggtgaaaccggaagacttcaagaatgtccggactgtccatgatgttgtgaccgtgatccaaaacatgacggcttag

SEQ ID NO: 10 - protein, 81 aa, Acinetobacter sp. ADP1
MLSQEHILSTLREWMEDLFEIEPETIQLDSNLYSDLDVDSIDAVDLIVKIKELTGKQVKPEDFKNVRTVHDVVTVIQNMTA

SEQ ID NO: 11 - DNA, 345 bp, Acinetobacter sp. ADP1
atggtcgtctacacgtggccgaaatgtcgttgcattaactttcagaaaatccaatacagcatcaaactgacagcgatcaaaacgcctcgagcaatgcgccgcattcccgtgtctgatattgaacaacgggtgaagcaggccgtggcagaacagctcggcatcaaagccgaagaaatcaagaatgaggcttcgttcatggatgacttgggtgccgacagtctggatctcgtcgagctggtgatgagctttgagaatgattttgatatcaccattccggatgaagactcgaacgagatcactaccgttcaatccgcgattgactacgtgaccaagaagctgggttag

SEQ ID NO: 12 - protein, 114 aa, Acinetobacter sp. ADP1
MVVYTWPKCRCINFQKIQYSIKLTAIKTPRAMRRIPVSDIEQRVKQAVAEQLGIKAEEIKNEASFMDDLGADSLDLVELVMSFENDFDITIPDEDSNEITTVQSAIDYVTKKLG

SEQ ID NO: 13 - DNA, 246 bp, Spinacia oleracea
gcaaagaaggaaacaattgacaaagtgtgcgacattgtaaaggagaaactggctttaggagctgatgttgtggtcacagctgattccgagtttagtaaactcggtgctgattcattggacacggttgagatagtgatgaacctcgaggaagagttcggtatcaatgtggatgaagataaagctcaagatatatcaaccatccaacaagccgccgacgttattgagagtcttcttgagaagaaatag

SEQ ID NO: 14 - protein, 81 aa, Spinacia oleracea
AKKETIDKVCDIVKEKLALGADVVVTADSEFSKLGADSLDTVEIVMNLEEEFGINVDEDKAQDISTIQQAADVIESLLEKK

SEQ ID NO: 15 - protein, 7 aa, Artificial Sequence
  Heptapeptide retention motif
  VARIANT (3)..(3): Xaa = Any Amino Acid
FYXDWWN

SEQ ID NO: 16 - DNA, 1752 bp, Escherichia coli
atgttaacggcatgtatatcatttggggttgcgatgacgacgaacacgcattttagaggtgaagaattgaaaaaagtgtggctcaatcggtatccggcggatgtcccaactgaaatcaaccctgatcgatatcagtccctcgtggacatgtttgaacagagcgtggcacgctacgccgatcagcccgccttcgtgaatatgggcgaggttatgacgtttcggaaattggaagaacgctctcgggcgtttgcggcttatttgcagcagggcctgggcctgaagaaaggtgatcgggtcgccttgatgatgcccaacctcttgcaatacccggtcgccctgtttggaatcctgcgtgctggcatgattgtcgtgaatgtgaatcctctctacacccctcgtgaactcgaacaccagctgaacgatagtggcgcttccgctattgttatcgtgtctaatttcgctcatacgctggagaaggtcgtggacaagacagccgttcaacacgtcattctgacccgcatgggtgatcaactgagtacggcaaaaggtacggtcgtcaattttgtcgtcaaatatatcaaacgtctggtccccaagtaccatctgccagacgcgatttccttccggagtgctttgcataacggatatcgaatgcaatacgtgaaacccgaactggtgcctgaggacctcgcatttctgcagtacacaggtggcaccaccggggtggccaagggtgctatgctgacacatcgaaatatgctcgccaacctcgagcaggtcaacgccacctacggtccgctgttgcacccaggcaaggagctggttgtgacggctttgcccctgtatcatatttttgctctgacgatcaactgcctgctgtttattgagttgggtggtcagaacctcctgatcaccaatccacgcgatattccgggcctcgttaaagaactcgcgaaatacccctttactgcgatcacgggtgttaatactctctttaacgcgctgctcaacaataaggagttccaacagttggacttcagcagcctgcatctctctgccggcggtggcatgcctgtgcaacaagttgttgcggagcgatgggtgaaattgacggggcagtatctgttggaggggtacgggttgaccgaatgcgcacctctggtgtcggtgaacccctacgatattgactaccacagcggatcgatcggcctgccggtgccgtcgacagaagcgaaactggttgacgacgatgataacgaggtgcccccaggccaaccgggggagttgtgtgttaagggaccgcaagtcatgctcgggtactggcagcggccggatgccactgatgaaattatcaagaatggttggctccacaccggggacattgcagttatggatgaagagggattcctgcgcatcgtcgatcgcaaaaaagacatgatcctcgtgtccggctttaatgtctatccaaatgaaatcgaggatgtcgttatgcagcaccctggggtgcaggaggttgccgctgttggcgtgcctagcgggagtagcggcgaagcggtcaaaattttcgttgtcaagaaggaccccagtttgaccgaagagtcgttggtcacgttctgtcgccgccaactgactggatataaagtccccaaactcgtcgaatttcgggatgaattgcccaagtcgaacgtcggcaagatcctccgccgcgagttgcgcgatgaagcacgcggtaaggttgacaataaggcttag

SEQ ID NO: 17 - protein, 583 aa, Escherichia coli
MLTACISFGVAMTTNTHFRGEELKKVWLNRYPADVPTEINPDRYQSLVDMFEQSVARYADQPAFVNMGEVMTFRKLEERSRAFAAYLQQGLGLKKGDRVALMMPNLLQYPVALFGILRAGMIVVNVNPLYTPRELEHQLNDSGASAIVIVSNFAHTLEKVVDKTAVQHVILTRMGDQLSTAKGTVVNFVVKYIKRLVPKYHLPDAISFRSALHNGYRMQYVKPELVPEDLAFLQYTGGTTGVAKGAMLTHRNMLANLEQVNATYGPLLHPGKELVVTALPLYHIFALTINCLLFIELGGQNLLITNPRDIPGLVKELAKYPFTAITGVNTLFNALLNNKEFQQLDFSSLHLSAGGGMPVQQVVAERWVKLTGQYLLEGYGLTECAPLVSVNPYDIDYHSGSIGLPVPSTEAKLVDDDDNEVPPGQPGELCVKGPQVMLGYWQRPDATDEIIKNGWLHTGDIAVMDEEGFLRIVDRKKDMILVSGFNVYPNEIEDVVMQHPGVQEVAAVGVPSGSSGEAVKIFVVKKDPSLTEESLVTFCRRQLTGYKVPKLVEFRDELPKSNVGKILRRELRDEARGKVDNKA

SEQ ID NO: 18 - DNA, 2103 bp, Saccharomyces cerevisiae S288c
atggttgctcaatataccgttccagttgggaaagccgccaatgagcatgaaactgctccaagaagaaattatcaatgccgcgagaagccgctcgtcagaccgcctaacacaaagtgttccactgtttatgagtttgttctagagtgctttcagaagaacaaaaattcaaatgctatgggttggagggatgttaaggaaattcatgaagaatccaaatcggttatgaaaaaagttgatggcaaggagacttcagtggaaaagaaatggatgtattatgaactatcgcattatcattataattcatttgaccaattgaccgatatcatgcatgaaattggtcgtgggttggtgaaaataggattaaagcctaatgatgatgacaaattacatctttacgcagccacttctcacaagtggatgaagatgttcttaggagcgcagtctcaaggtattcctgtcgtcactgcctacgatactttgggagagaaagggctaattcattctttggtgcaaacggggtctaaggccatttttaccgataactctttattaccatccttgatcaaaccagtgcaagccgctcaagacgtaaaatacataattcatttcgattccatcagttctgaggacaggaggcaaagtggtaagatctatcaatctgctcatgatgccatcaacagaattaaagaagttagacctgatatcaagacctttagctttgacgacatcttgaagctaggtaaagaatcctgtaacgaaatcgatgttcatccacctggcaaggatgatctttgttgcatcatgtatacgtctggttctacaggtgagccaaagggtgttgtcttgaaacattcaaatgttgtcgcaggtgttggtggtgcaagtttgaatgttttgaagtttgtgggcaataccgaccgtgttatctgttttttgccactagctcatatttttgaattggttttcgaactattgtccttttattggggggcctgcattggttatgccaccgtaaaaactttaactagcagctctgtgagaaattgtcaaggtgatttgcaagaattcaagcccacaatcatggttggtgtcgccgctgtttgggaaacagtgagaaaagggatcttaaaccaaattgataatttgcccttcctcaccaagaaaatcttctggaccgcgtataataccaagttgaacatgcaacgtctccacatccctggtggcggcgccttaggaaacttggttttcaaaaaaatcagaactgccacaggtggccaattaagatatttgttaaacggtggttctccaatcagtcgggatgctcaggaattcatcacaaatttaatctgccctatgcttattggttacggtttaaccgagacatgcgctagtaccaccatcttggatcctgctaattttgaactcggcgtcgctggtgacctaacaggttgtgttaccgtcaaactagttgatgttgaagaattaggttattttgctaaaaacaaccaaggtgaagtttggatcacaggtgccaatgtcacgcctgaatattataagaatgaggaagaaacttctcaagctttaacaagcgatggttggttcaagaccggtgacatcggtgaatgggaagcaaatggccatttgaaaataattgacaggaagaaaaacttggtcaaaacaatgaacggtgaatatatcgcactcgagaaattagagtccgtttacagatctaacgaatatgttgctaacatttgtgtttatgccgaccaatctaagactaagccagttggtattattgtaccaaatcatgctccattaacgaagcttgctaaaaagttgggaattatggaacaaaaagacagttcaattaatatcgaaaattatttggaggatgcaaaattgattaaagctgtttattctgatcttttgaagacaggtaaagaccaaggtttggttggcattgaattactagcaggcatagtgttctttgacggcgaatggactccacaaaacggttttgttacgtccgctcagaaattgaaaagaaaagacattttgaatgctgtcaaagataaagttgacgccgtttatagttcgtcttaa

SEQ ID NO: 19 - protein, 700 aa, Saccharomyces cerevisiae S288c
MVAQYTVPVGKAANEHETAPRRNYQCREKPLVRPPNTKCSTVYEFVLECFQKNKNSNAMGWRDVKEIHEESKSVMKKVDGKETSVEKKWMYYELSHYHYNSFDQLTDIMHEIGRGLVKIGLKPNDDDKLHLYAATSHKWMKMFLGAQSQGIPVVTAYDTLGEKGLIHSLVQTGSKAIFTDNSLLPSLIKPVQAAQDVKYIIHFDSISSEDRRQSGKIYQSAHDAINRIKEVRPDIKTFSFDDILKLGKESCNEIDVHPPGKDDLCCIMYTSGSTGEPKGVVLKHSNVVAGVGGASLNVLKFVGNTDRVICFLPLAHIFELVFELLSFYWGACIGYATVKTLTSSSVRNCQGDLQEFKPTIMVGVAAVWETVRKGILNQIDNLPFLTKKIFWTAYNTKLNMQRLHIPGGGALGNLVFKKIRTATGGQLRYLLNGGSPISRDAQEFITNLICPMLIGYGLTETCASTTILDPANFELGVAGDLTGCVTVKLVDVEELGYFAKNNQGEVWITGANVTPEYYKNEEETSQALTSDGWFKTGDIGEWEANGHLKIIDRKKNLVKTMNGEYIALEKLESVYRSNEYVANICVYADQSKTKPVGIIVPNHAPLTKLAKKLGIMEQKDSSINIENYLEDAKLIKAVYSDLLKTGKDQGLVGIELLAGIVFFDGEWTPQNGFVTSAQKLKRKDILNAVKDKVDAVYSSS

SEQ ID NO: 20 - DNA, 2235 bp, Saccharomyces cerevisiae S288c
atggccgctccagattatgcacttaccgatttaattgaatcggatcctcgtttcgaaagtttgaagacaagattagccggttacaccaaaggctctgatgaatatattgaagagctatactctcaattaccactgaccagctatcccaggtacaaaacatttttaaagaaacaggcggttgccatttcgaatccggataatgaagctggttttagctcgatttataggagttctctttcttctgaaaatctagtgagctgtgtggataaaaacttaagaactgcatacgatcacttcatgttttctgcaaggagatggcctcaacgtgactgtttaggttcaaggccaattgataaagccacaggcacctgggaggaaacattccgtttcgagtcgtactccacggtatctaaaagatgtcataatatcggaagtggtatattgtctttggtaaacacgaaaaggaaacgtcctttggaagccaatgattttgttgttgctatcttatcacacaacaaccctgaatggatcctaacagatttggcctgtcaggcctattctctaactaacacggctttgtacgaaacattaggtccaaacacctccgagtacatattgaatttaaccgaggcccccattctgatttttgcaaaatcaaatatgtatcatgtattgaagatggtgcctgatatgaaatttgttaatactttggtttgtatggatgaattaactcatgacgagctccgtatgctaaatgaatcgttgctacccgttaagtgcaactctctcaatgaaaaaatcacatttttttcattggagcaggtagaacaagttggttgctttaacaaaattcctgcaattccacctaccccagattccttgtatactatttcgtttacttctggtactacaggtttacctaaaggtgtggaaatgtctcacagaaacattgcgtctgggatagcatttgctttttctaccttcagaataccgccagataaaagaaaccaacagttatatgatatgtgttttttgccattggctcatatttttgaaagaatggttattgcgtatgatctagccatcgggtttggaataggcttcttacataaaccagacccaactgtattggtagaggatttgaagattttgaaaccttacgcggttgccctggttcctagaatattaacacggtttgaagccggtataaaaaacgctttggataaatcgactgtccagaggaacgtagcaaatactatattggattctaaatcggccagatttaccgcaagaggtggtccagataaatcgattatgaattttctagtttatcatcgcgtattgattgataaaatcagagactctttaggtttgtccaataactcgtttataattaccggatcagctcccatatctaaagataccttactatttttaagaagtgccttggatattggtataagacagggctacggcttaactgaaacttttgctggtgtctgtttaagcgaaccgtttgaaaaagatgtcggatcttgtggtgccataggtatttctgcagaatgtagattgaagtctgttccagaaatgggttaccatgccgacaaggatttaaaaggtgaactgcaaattcgtggcccacaggtttttgaaagatattttaaaaatccgaatgaaacttcaaaagccgttgaccaagatggttggttttccacgggagatgttgcatttatcgatggaaaaggtcgcatcagcgtcattgatcgagtcaagaactttttcaagctagcacatggtgaatatattgctccagagaaaatcgaaaatatttatttatcatcatgcccctatatcacgcaaatatttgtctttggagatcctttaaagacatttttagttggcatcgttggtgttgatgttgatgcagcgcaaccgattttagctgcaaagcacccagaggtgaaaacgtggactaaggaagtgctagtagaaaacttaaatcgtaataaaaagctaaggaaggaatttttaaacaaaattaataaatgcaccgatgggctacaaggattcgaaaaattgcataacatcaaagtcggacttgagcctttaactctcgaggatgatgttgtgacgccaacttttaaaataaagcgtgccaaagcatcaaaattcttcaaagatacattagaccaactatacgccgaaggttcactagtcaagacagaaaagctttag

SEQ ID NO: 21 - protein, 744 aa, Saccharomyces cerevisiae S288c
MAAPDYALTDLIESDPRFESLKTRLAGYTKGSDEYIEELYSQLPLTSYPRYKTFLKKQAVAISNPDNEAGFSSIYRSSLSSENLVSCVDKNLRTAYDHFMFSARRWPQRDCLGSRPIDKATGTWEETFRFESYSTVSKRCHNIGSGILSLVNTKRKRPLEANDFVVAILSHNNPEWILTDLACQAYSLTNTALYETLGPNTSEYILNLTEAPILIFAKSNMYHVLKMVPDMKFVNTLVCMDELTHDELRMLNESLLPVKCNSLNEKITFFSLEQVEQVGCFNKIPAIPPTPDSLYTISFTSGTTGLPKGVEMSHRNIASGIAFAFSTFRIPPDKRNQQLYDMCFLPLAHIFERMVIAYDLAIGFGIGFLHKPDPTVLVEDLKILKPYAVALVPRILTRFEAGIKNALDKSTVQRNVANTILDSKSARFTARGGPDKSIMNFLVYHRVLIDKIRDSLGLSNNSFIITGSAPISKDTLLFLRSALDIGIRQGYGLTETFAGVCLSEPFEKDVGSCGAIGISAECRLKSVPEMGYHADKDLKGELQIRGPQVFERYFKNPNETSKAVDQDGWFSTGDVAFIDGKGRISVIDRVKNFFKLAHGEYIAPEKIENIYLSSCPYITQIFVFGDPLKTFLVGIVGVDVDAAQPILAAKHPEVKTWTKEVLVENLNRNKKLRKEFLNKINKCTDGLQGFEKLHNIKVGLEPLTLEDDVVTPTFKIKRAKASKFFKDTLDQLYAEGSLVKTEKL

SEQ ID NO: 22 - DNA, 2081 bp, Artificial Sequence
  S. cerevisiae FadD homolog (Faa3p)  - codon optimized
atgtctgaacaacactcggtggccgtcggtaaagccgctaacgaacatgaaactgccccccgacgtaacgtgcgcgtgaaaaaacgccccttgattcgccctctcaatagcagcgcgtcgacgttgtatgagtttgccctggaatgctttaacaaggggggcaaacgcgatggcatggcgtggcgagacgtcatcgagattcacgaaacgaagaagactatcgtgcgtaaggtcgacggaaaggataaaagcattgaaaagacctggctgtactacgaaatgagcccgtacaaaatgatgacgtatcaggaactcatttgggtgatgcatgatatgggtcgcgggctcgccaagattggcatcaagcccaacggtgaacacaaatttcatattttcgcgtcgacctcccacaaatggatgaaaatctttctcggctgcatctcgcaaggcattcctgtggtcaccgcttatgataccctcggcgaaagtggtctcattcattctatggtggaaacagagagtgctgctatctttacagataaccaattgctggcgaaaatgatcgtgcctctgcagtctgctaaagatatcaagtttctcattcacaacgagccaatcgaccccaatgatcgacgccagaatggaaaactctataaagctgctaaggacgcgatcaacaagattcgcgaggttcggcctgatatcaagatttactcgttcgaagaagtggttaaaatcggcaagaagagtaaagatgaagtgaaactgcatccgcccgaacccaaggatctcgcgtgtatcatgtacaccagtggatctatcagcgcgcccaaaggggtggtcctgacccattataatatcgtcagtgggattgcaggcgttgggcataacgtctttggctggatcggctccaccgatcgtgtcctgagctttttgcctctcgcacacattttcgaactcgtttttgaattcgaagcgttctactggaatggtattctgggatacggcagcgtgaaaaccttgacgaatacgagcacccgcaactgtaaaggtgatctggtggagtttaaaccgaccatcatgattggtgttgcggccgtttgggagacggtccgcaaagcgatcctggagaaaatcagtgatttgacaccggtgctgcagaagattttctggtcggcttacagcatgaaagagaaaagtgtgccatgcacgggatttttgtctcgtatggtctttaaaaaggttcgacaagctaccggtggtcacctcaagtatattatgaatggcggctccgctatctctattgacgcccaaaaattctttagtatcgtcttgtgcccgatgatcattggttatggcttgactgaaacagtggcaaacgcctgtgttctcgagccggaccattttgagtatggcatcgttggggacctggtggggtcggtcacggcaaaattggttgacgtgaaggatctggggtactatgccaaaaataatcagggggaactcctgttgaagggagcgcccgtctgcagcgaatactacaagaatccgattgagacagctgtgagcttcacatacgacggttggtttcgtaccggcgatatcgtcgagtggacgccaaagggtcagctcaaaattattgatcggcgcaagaacctggtcaagactttgaatggcgagtatattgcgctggaaaagctggagagcgtttaccgctcgaacagttacgtcaagaatatctgtgtgtacgccgatgagtcccgagtgaaacccgttggtattgtggtcccaaaccctggaccgctgtctaagtttgctgtcaagctgcgcattatgaagaagggggaagacattgagaattatattcacgataaggcgctccggaacgcagtgttcaaagagatgatcgccactgcaaaatcgcagggcctggtcggcattgagctgttgtgtggtatcgttttcttcgacgaggaatggactcccgaaaatggcttcgtgactagcgcccaaaagttgaaacggcgcgagattttggcagccgtcaaatccgaggttgaacgcgtctataaagaaaatag

SEQ ID NO: 23 - protein, 694 aa, Saccharomyces cerevisiae S288c
MSEQHSVAVGKAANEHETAPRRNVRVKKRPLIRPLNSSASTLYEFALECFNKGGKRDGMAWRDVIEIHETKKTIVRKVDGKDKSIEKTWLYYEMSPYKMMTYQELIWVMHDMGRGLAKIGIKPNGEHKFHIFASTSHKWMKIFLGCISQGIPVVTAYDTLGESGLIHSMVETESAAIFTDNQLLAKMIVPLQSAKDIKFLIHNEPIDPNDRRQNGKLYKAAKDAINKIREVRPDIKIYSFEEVVKIGKKSKDEVKLHPPEPKDLACIMYTSGSISAPKGVVLTHYNIVSGIAGVGHNVFGWIGSTDRVLSFLPLAHIFELVFEFEAFYWNGILGYGSVKTLTNTSTRNCKGDLVEFKPTIMIGVAAVWETVRKAILEKISDLTPVLQKIFWSAYSMKEKSVPCTGFLSRMVFKKVRQATGGHLKYIMNGGSAISIDAQKFFSIVLCPMIIGYGLTETVANACVLEPDHFEYGIVGDLVGSVTAKLVDVKDLGYYAKNNQGELLLKGAPVCSEYYKNPIETAVSFTYDGWFRTGDIVEWTPKGQLKIIDRRKNLVKTLNGEYIALEKLESVYRSNSYVKNICVYADESRVKPVGIVVPNPGPLSKFAVKLRIMKKGEDIENYIHDKALRNAVFKEMIATAKSQGLVGIELLCGIVFFDEEWTPENGFVTSAQKLKRREILAAVKSEVERVYKENS

SEQ ID NO: 24 - DNA, 1632 bp, Synechococcus elongatus PCC 7942
atgaatatccacactgtcgcgacgcaagcctttagcgaccaaaagcccggtacctccggcctgcgcaagcaagttcctgtcttccaaaaacggcactatctcgaaaactttgtccagtcgatcttcgatagccttgagggttatcagggccagacgttagtgctggggggtgatggccgctactacaatcgcacagccatccaaaccattctgaaaatggcggcggccaatggttggggccgcgttttagttggacaaggcggtattctctccacgccagcagtctccaacctaatccgccagaacggagccttcggcggcatcatcctctcggctagccacaacccagggggccctgagggcgatttcggcatcaagtacaacatcagcaacggtggccctgcacccgaaaaagtcaccgatgccatctatgcctgcagcctcaaaattgaggcctaccgcattctcgaagccggtgacgttgacctcgatcgactcggtagtcaacaactgggcgagatgaccgttgaggtgatcgactcggtcgccgactacagccgcttgatgcaatccctgtttgacttcgatcgcattcgcgatcgcctgaggggggggctacggattgcgatcgactcgatgcatgccgtcaccggtccctacgccaccacgatttttgagaaggagctaggcgcggcggcaggcactgtttttaatggcaagccgctggaagactttggcgggggtcacccagacccgaatttggtctacgcccacgacttggttgaactgttgtttggcgatcgcgccccagattttggcgcggcctccgatggcgatggcgatcgcaacatgatcttgggcaatcacttttttgtgacccctagcgacagcttggcgattctcgcagccaatgccagcctagtgccggcctaccgcaatggactgtctgggattgcgcgatccatgcccaccagtgcggcggccgatcgcgtcgcccaagccctcaacctgccctgctacgaaaccccaacgggttggaagtttttcggcaatctgctcgatgccgatcgcgtcaccctctgcggcgaagaaagctttggcacaggctccaaccatgtgcgcgagaaggatggcctgtgggccgtgctgttctggctgaatattctggcggtgcgcgagcaatccgtggccgaaattgtccaagaacactggcgcacctacggccgcaactactactctcgccacgactacgaaggggtggagagcgatcgagccagtacgctggtggacaaactgcgatcgcagctacccagcctgaccggacagaaactgggagcctacaccgttgcctacgccgacgacttccgctacgaagatccggtcgatggcagcatcagcgaacagcagggcattcgtattggctttgaagacggctcacgtatggtcttccgcttgtctggtactggtacggcaggagccaccctgcgcctctacctcgagcgcttcgaaggggacaccaccaaacagggtctcgatccccaagttgccctggcagatttgattgcaatcgccgatgaagtcgcccagatcacaaccttgacgggcttcgatcaaccgacagtgatcacctga

SEQ ID NO: 25 - DNA, 1704 bp, Synechocystis sp. PCC 6803
gtgtctaagcccctgatcgccgccctccattttttacaatttttgtatatgacaagcagaattaatcccctcgccggccagcatccccccgccgacagccttttggatgtggccaaacttttagacgactattaccgtcagcaaccggacccggaaaatcccgcccagttagtgagctttggtacctctggccatcggggttctgccctcaacggtacttttaatgaagcccatattttggcggtgacccaggcagtggtggactatcgccaagcccagggcattacggggcccctttatatggggatggatagccatgctctgtcggaaccagcccagaaaacggcgttggaagtgttggccgctaaccaagtagaaacttttttaaccaccgccacggatttaacccgtttcacccccactccggcggtatcctacgccattttgacccacaaccagggacgtaaagaaggtttagcggacggcattattattaccccttcccacaatccccccactgatggaggctttaaatataatcccccctccggtggcccggcggaaccggaagcgacccaatggattcagaaccgggccaatgagttgctgaaaaatggcaataaaacagttaaacggctggattacgagcaggcattaaaagccaccaccacccatgcccatgattttgtcactccctatgtggccggtctggcggacatcattgacttggatgtaattcgttcagcgggcttgcgcttgggagttgaccccctggggggagccaatgtgggctattgggaacccattgccgctaaatacaatttgaacatcagcttggttaatcccggggtagatcccacgtttaaatttatgaccctggattgggacggcaaaatccgcatggattgttcttccccctacgccatggccagtttggtgaaaatcaaagaccattacgacattgcctttggcaacgacaccgacggcgatcgccatggcattgtcacccccagcgtgggtttgatgaatcccaatcattttctttccgtggccatttggtatttgtttagtcagcggcaacagtggtcagggctgtcggcgatcggcaaaaccctagtcagcagcagcatgattgaccgggtgggggccatgattaatcgccaagtttacgaagtgcccgtgggctttaaatggtttgtcagcggtttgctagatggttcctttggctttgggggtgaagaaagtgccggggcttcgtttttgaaaaaaaatggcaccgtttggaccaccgacaaagatggcaccattatggatttattggcggcggaaatcaccgctaaaaccggcaaagatcccggcctccattaccaggatttgaccgctaagttaggtaatcccatttaccaacgcattgatgcccccgccactccggcccaaaaagaccgcttgaaaaaactgtcccccgatgacgttacagctacctccttagctggggatgccattactgctaaattaaccaaagcccctggcaaccaagcggcgatcggtgggttgaaggtgaccactgcggaaggttggtttgcggcccggccctccggcacggaaaatgtttacaaaatctatgccgaaagtttcaaagacgaagcccatctccaggctattttcacggaggcggaagccattgttacctcggctttgggctaa

SEQ ID NO: 26 - DNA, 1659 bp, Synechococcus sp. WH8102
atgaccacctcggcccccgcggaaccgaccctgcgcctggtgcgcctggacgcacctttcacggatcagaaacccggcacatccggtttgcgcaaaagcagccagcagttcgagcaagcgaactatctggagagctttgtggaagccgtattccgcaccttgcccggtgttcaagggggcacgctggtgttgggaggtgacggccgttacggcaaccgccgtgccatcgacgtgatcctgcgcatgggcgcggcccacggcctcagcaaggtgatcgtcaccaccggcggcatcctctccaccccggcggcctcgaacctgattcgccagcgtcaggccatcggcggcatcatcctctcggcaagccacaaccctggcggccccaatggagacttcggcgtcaaggtgaatggcgccaacggtggcccgaccccggcctcgttcaccgatgcggtgttcgagtgcaccaagaccttggagcaatacacgatcgttgatgccgcggccatcgccatcgatacccccggcagctacagcatcggcgccatgcaggtggaggtgatcgacggcgtcgacgacttcgtggctctgatgcaacagctgttcgactttgatcggatccgggagctgatccgcagcgacttcccgctggcgtttgatgcgatgcatgcggtcactggcccctacgccactcgcctgttggaagagatcctcggcgctcctgccggcagcgtccgcaacggcgttcctctggaggacttcggcggcggccaccccgaccccaacctcacctacgcccacgagctggccgaacttctgctcgacggggaggagttccgcttcggggccgcctgcgacggcgatggtgaccgcaacatgatcctggggcagcactgcttcgtaaaccccagcgacagcctggcggtgctcacagccaacgccacggtggcaccggcctatgccgatggtttggctggcgtggcccgctcgatgcccaccagctctgccgtggatgtggtggccaaggaactgggcatcgactgctacgagacccccaccggctggaagttcttcggcaatctgctggatgccggcaaaatcacgctctgcggtgaagagagcttcggcaccggcagcaaccacgtgcgtgaaaaggatggcctctgggctgttctgttctggctgcagatcctggccgagcgccgctgcagcgtcgccgagatcatggctgagcattggaagcgcttcggccgccactactactctcgccacgactacgaagccgtcgccagcgacgcagcccatgggctgttccaccgcctcgagggcatgctccctggtctggtggggcagagcttcgctggccgcagcgtcagcgcagccgacaacttcagctacaccgatcccgttgatggctctgtgaccaagggccagggcctgcgcatcctgctggaggatggcagccgcgtgatggtgcgcctctcgggcaccggcaccaagggcgccacgatccgcgtctatctggagagttatgtaccgagcagcggtgatctcaaccaggatccccaggtcgctctggccgacatgatcagcgccatcaatgaactggcggagatcaagcagcgcaccggcatggatcggcccaccgtgatcacctga

SEQ ID NO: 27 - DNA, 1293 bp, Synechococcus elongatus PCC 7942
gtgaaaaacgtgctggcgatcattctcggtggaggcgcaggcagtcgtctctatccactaaccaaacagcgcgccaaaccagcggtccccctggcgggcaaataccgcttgatcgatattcccgtcagcaattgcatcaacgctgacatcaacaaaatctatgtgctgacgcagtttaactctgcctcgctcaaccgccacctcagtcagacctacaacctctccagcggctttggcaatggctttgttgaggtgctagcagctcagattacgccggagaaccccaactggttccaaggcaccgccgatgcggttcgccagtatctctggctaatcaaagagtgggatgtggatgagtacctgatcctgtcgggggatcatctctaccgcatggactatagccagttcattcagcggcaccgagacaccaatgccgacatcacactctcggtcttgccgatcgatgaaaagcgcgcctctgattttggcctgatgaagctagatggcagcggccgggtggtcgagttcagcgaaaagcccaaaggggatgaactcagggcgatgcaagtcgataccacgatcctcgggcttgaccctgtcgctgctgctgcccagcccttcattgcctcgatgggcatctacgtcttcaagcgggatgttctgatcgatttgctcagccatcatcccgagcaaaccgactttggcaaggaagtgattcccgctgcagccacccgctacaacacccaagcctttctgttcaacgactactgggaagacatcggcacgatcgcctcattctacgaggccaatctggcgctgactcagcaacctagcccacccttcagcttctacgacgagcaggcgccgatttacacccgcgctcgctacctgccgccaaccaagctgctcgattgccaggtgacccagtcgatcattggcgagggctgcattctcaagcaatgcaccgttcagaattccgtcttagggattcgctcccgcattgaggccgactgcgtgatccaggacgccttgttgatgggcgctgacttctacgaaacctcggagctacggcaccagaatcgggccaatggcaaagtgccgatgggaatcggcagtggcagcaccatccgtcgcgccatcgtcgacaaaaatgcccacattggccagaacgttcagatcgtcaacaaagaccatgtggaagaggccgatcgcgaagatctgggctttatgatccgcagcggcattgtcgttgtggtcaaaggggcggttattcccgacaacacggtgatctaa

SEQ ID NO: 28 - DNA, 1320 bp, Synechocystis sp. PCC 6803
gtgtgttgttggcaatcgagaggtctgcttgtgaaacgtgtcttagcgattatcctgggcggtggggccgggacccgcctctatcctttaaccaaactcagagccaaacccgcagttcccttggccggaaagtatcgcctcatcgatattcccgtcagtaattgcatcaactcagaaatcgttaaaatttacgtccttacccagtttaattccgcctcccttaaccgtcacatcagccgggcctataatttttccggcttccaagaaggatttgtggaagtcctcgccgcccaacaaaccaaagataatcctgattggtttcagggcactgctgatgcggtacggcaatacctctggttgtttagggaatgggacgtagatgaatatcttattctgtccggcgaccatctctaccgcatggattacgcccaatttgttaaaagacaccgggaaaccaatgccgacataaccctttccgttgtgcccgtggatgacagaaaggcacccgagctgggcttaatgaaaatcgacgcccagggcagaattactgacttttctgaaaagccccagggggaagccctccgggccatgcaggtggacaccagcgttttgggcctaagtgcggagaaggctaagcttaatccttacattgcctccatgggcatttacgttttcaagaaggaagtattgcacaacctcctggaaaaatatgaaggggcaacggactttggcaaagaaatcattcctgattcagccagtgatcacaatctgcaagcctatctctttgatgactattgggaagacattggtaccattgaagccttctatgaggctaatttagccctgaccaaacaacctagtcccgactttagtttttataacgaaaaagcccccatctataccaggggtcgttatcttccccccaccaaaatgttgaattccaccgtgacggaatccatgatcggggaaggttgcatgattaagcaatgtcgcatccaccactcagttttaggcattcgcagtcgcattgaatctgattgcaccattgaggatactttggtgatgggcaatgatttctacgaatcttcatcagaacgagacaccctcaaagcccggggggaaattgccgctggcataggttccggcaccactatccgccgagccatcatcgacaaaaatgcccgcatcggcaaaaacgtcatgattgtcaacaaggaaaatgtccaggaggctaaccgggaagagttaggtttttacatccgcaatggcatcgtagtagtgattaaaaatgtcacgatcgccgacggcacggtaatctag

SEQ ID NO: 29 - DNA, 1290 bp, Synechococcus sp. PCC 7002
gtgaaacgagtcctaggaatcatacttggcggcggcgcaggtactcgcctatatccgctaacaaaactcagagctaagcccgcagtacctctagcaggcaaatatcgtctcattgatattcctgttagcaattgcattaattctgaaattcataaaatctacattttaacccaatttaattcagcatctttaaatcgtcacattagtcgaacctacaactttaccggcttcaccgaaggctttaccgaagtactcgcagcccaacaaactaaagaaaatcccgattggttccaaggcaccgccgacgctgtccgacagtacagttggcttctagaagactgggatgtcgatgaatacatcattctctccggtgatcacctctaccgtatggattaccgtgaatttatccagcgccaccgtgacactggggcagacatcaccctgtctgtggttcccgtgggcgaaaaagtagcccccgcctttgggttgatgaaaattgatgccaatggtcgtgtcgtggactttagtgaaaagcccactggtgaagcccttaaggcgatgcaggtggatacccagtccttgggtctcgatccagagcaggcgaaagaaaagccctacattgcgtcgatggggatctacgtctttaagaaacaagtactcctcgatctactcaaagaaggcaaagataaaaccgatttcgggaaagaaattattcctgatgcggccaaggactacaacgttcaggcctatctctttgatgattattgggctgacattgggaccatcgaagcgttctatgaagcaaaccttggcttgacgaagcagccgatcccaccctttagtttctatgacgaaaaggctcccatctacacccgggcgcgctacttaccgccgacgaaggtgctcaacgctgacgtgacagaatcgatgatcagcgaaggttgcatcattaaaaactgccgcattcaccactcagttcttggcattcgcacccgtgtcgaagcggactgcactatcgaagatacgatgatcatgggcgcagattattatcagccctatgagaagcgccaggattgtctccgtcgtggcaagcctcccattgggattggtgaagggacaacgattcgccgggcgatcatcgataaaaatgcacgcatcggtaaaaacgtgatgatcgtcaataaggaaaatgtggaggagtcaaaccgtgaggagcttggctactacattcgcagcggcattacagtggtgctaaagaacgccgttattcccgacggtacggtcatttaa

SEQ ID NO: 30 - DNA, 1296 bp, Synechococcus sp. WH8102
atgaagcgggttttggccatcattctcggcggcggtgccgggactcgtctctacccgctcaccaagatgcgcgccaagccggccgtccccttggccggtaagtatcgactgattgatatccccatcagcaactgcatcaactcgaacatcaacaagatgtacgtgatgacgcagttcaacagtgcgtctctcaatcgtcacctcagccagacgttcaacctgagcgcatccttcggtcagggattcgtcgaggtgcttgctgcccagcagacgcctgacagtccatcctggtttgaaggcactgccgacgctgtgcggaagtaccagtggctgttccaggaatgggatgtcgatgaatacctgatcctgtccggtgaccagctgtaccggatggattacagcctgttcgttgaacatcaccgcagcactggtgctgacctcaccgttgcagcccttcctgtggacccgaaacaggccgaggcgttcggcttgatgcgcacggatggtgacggagacatcaaggagttccgcgaaaagcccaagggtgattctttgcttgagatggcggttgacaccagccgatttggactcagtgcgaattcggccaaggagcgtccctacctggcgtcgatggggatttatgtcttcagcagagacactctgttcgacctgctcgattccaatcctggttataaggacttcggcaaggaagtcattcctgaggccctcaagcgtggcgacaagctgaagagctatgtctttgacgattattgggaagatatcggaacgatcggagcgttctacgaggccaacctggcgctcacccagcaacccacaccccccttcagcttctacgacgagaagttcccgatctacactcgtccccgctatttacccccgagcaaactggttgatgctcagatcaccaattcgatcgttggcgaaggctcaattttgaagtcatgcagcattcatcactgcgttttgggtgttcgcagtcgcattgaaaccgatgtggtgctgcaagacaccttggtgatgggcgctgacttctttgaatccagtgatgagcgtgccgtgcttcgcgagcgtggtggtattccggtcggggtgggccaaggtacgactgtgaagcgcgccatcctcgataaaaacgctcgcatcggatccaacgtcaccatcgtcaacaaggatcacgtcgaggaagctgatcgttccgatcagggcttctatattcgtaatggcattgttgttgttgtcaagaacgccaccatccaggacggaactgtgatctga

SEQ ID NO: 31 - DNA, 1296 bp, Synechococcus sp. RCC 307
atgaaacgggttctcgcaatcattctcggtggcggtgcgggtacgcggctctatccgctgaccaaaatgcgggccaaaccagccgtgccgctggcgggtaagtaccgcctcatcgacatccccgttagcaactgcatcaacagcgggatcaacaagatctatgtgctgacgcagttcaacagcgcatcactgaatcgccacatcgctcaaaccttcaacctctcctcggggtttgatcaagggtttgttgaagttctggcggcccagcagaccccagatagccccagttggtttgaaggaacagccgatgctgttcgtaaatacgaatggctgctgcaggagtgggacatcgacgaagtgctgatcctttcgggtgaccagctctaccggatggactatgcccattttgtggctcagcaccgcgccagcggcgctgacctcaccgtggccgccctcccggttgatcgcgagcaagcccagagctttggcttgatgcacaccggtgcagaagcctccatcaccaagttccgcgaaaagcccaaaggcgaggcactcgatgagatgtcctgcgataccgccagcatgggcttgagcgctgaggaagcccatcgccggccgttcctggcttccatgggcatctacgtgttcaagcgggacgtgctcttccgcttactggctgaaaaccccggtgccactgacttcggtaaggagatcatccccaaggcactcgacgatggcttcaaactccgctcctatctcttcgacgattactgggaagacatcggaaccatccgtgctttctatgaagcgaatctggcgctgacgacccagccgcgtccgcccttctctttctacgacaagcgtttcccgatctacacacgtcatcgctacctgccgccctccaagcttcaagatgcgcaggtcaccgactccattgttggtgaggggtccattttgaaggcttgcagtattcaccactgcgtcttgggtgtgcgcagccgcattgaagacgaggttgccttgcaagacaccctggtgatgggcaacgacttctatgagtccggcgaagagcgggccatcctgcgggaacgtggtggcatccccatgggtgtgggccgaggaaccacggtgaaaaaggccatcctcgataagaacgtccgcatcggcagcaacgtcagcatcatcaacaaagacaacgttgaggaagccgaccgcgctgagcagggcttctacatccgtggcgggattgtggtgatcaccaaaaacgcttcgattcccgacgggatggtgatctga

SEQ ID NO: 32 - DNA, 1287 bp, Trichodesmium erythraeum IMS 101
gtgaaaaacgtactaagtataattctaggcggtggcgcaggtacccgtttatatcccttaacaaaactacgggccaagcctgcagtgcccctagcaggaaaatatcgtttaatagatattcctataagtaattgcataaactcagaaatccagaaaatttatgttttgacccaatttaactcagcttctctaaaccgccatatcactcgtacctataacttctcaggtttcagtgatggttttgtcgaagttctagcagctcaacaaactaaagataatccagagtggtttcaaggaacagcagatgctgtccgtaaatatatatggttattcaaagagtgggatattgattattatctaattctctctggagaccatctctaccgtatggactaccgagactttgtccaacgccatatcgacaccaaggcagatatcaccctttctgtcttgcctattgatgaagcacgggcctccgagtttggcgtcatgaaaattgataactcaggtcgaattgttgaatttagtgaaaaaccgaaaggtaatgcccttaaagctatggcagttgatacttctattttaggagtcagtccagaaatagctacaaaacaaccttatattgcttctatgggaatttatgtatttaataaagatgcaatgatcaaacttatagaagattcagaggatacagattttggtaaggaaattttacccaagtcggctcaatcttataatcttcaagcctacccattccaaggttactgggaagacatcggaaccatcaaatcattttatgaagctaatttggctttgactcaacagcctcagccaccctttagcttttatgatgaacaagcccctatctatacccgctctcgttatttacctccgagcaaacttttggactgtgagattacagagtcaattgtgggagaaggttgtattcttaaaaaatgtcggattgaccattgtgtcttaggagtgcgatcgcgtatagaagctaattgtataattcaagattctctgctaatgggttcagatttctatgaatctcctacagaacgtcgatatggcctaaaaaaaggttctgtacctttgggtattggtgctgaaacgaaaattcgtggagcaattattgacaaaaatgcccgcattggttgtaatgtccaaataatcaataaggacaatgtagaagaagcccaacgtgaggaggaagggtttatcattcgcagtggtattgttgttgttttgaaaaatgctactattcccgatggtacagtgatttag

SEQ ID NO: 33 - DNA, 1290 bp, Anabaena variabilis
gtgaaaaaagtcttagcaattattcttggtggtggtgcgggtactcgcctttacccactaaccaaactccgcgctaaaccggcagtaccagtggcagggaaataccgcctaatagatatccctgtcagtaactgcattaattcggaaatttttaaaatctacgtattaacacaatttaactcagcttctctcaatcgccacattgcccgtacctacaactttagtggttttagcgagggttttgtggaagtgctggccgcccagcagacaccagagaaccctaactggttccaaggtacagccgatgctgtacgtcagtatctctggatgttacaagagtgggacgtagatgaatttttgatcctgtcaggagatcacctgtaccggatggattatcgcctatttatccagcgccatcgagaaaccaatgcggatatcacactttccgtaattcccattgacgatcgccgcgcctcggattttggtttaatgaagatcgataactctggacgagtcatcgattttagcgaaaaacccaaaggcgaagccttaaccaaaatgcgtgttgataccaccgttttaggcttgacaccagaacaggcagcatcacagccttacatcgcctcgatggggatttacgtatttaaaaaagatgttttgatcaaactgttgaaggaatctttagaacgtactgatttcggcaaagaaattattcctgatgcctccaaagatcacaacgttcaagcttacttattcgatgactactgggaagatattgggacaatcgaagctttttataatgctaatttagcattgactcagcagcccatgccgccctttagcttctacgacgaagaagcaccaatttatacccgcgcacgttacttaccacccacaaaactattagattgccacgttacagaatcaatcattggcgaaggctgtattctgaaaaactgtcgcattcaacactcagtattgggagtgcgatcgcgtattgaaaccggctgcgtcatcgaagaatctttactcatgggtgccgacttctaccaagcttcagtggaacgccagtgcagcattgacaaaggagacatccccgtaggcatcggcccagataccattattcgccgtgccatcatcgataaaaatgcccgcatcggtcacgatgtcaaaattatcaataaagacaacgtgcaggaagccgaccgcgaaagtcaaggattttacatccgcagtggcattgtcgtcgttctcaaaaatgccgtcattaccgatggcacaataatttag

SEQ ID NO: 34 - DNA, 1290 bp, Nostoc sp. PCC 7120
gtgaaaaaagtcttagcaattattcttggtggtggtgcgggtactcgcctttacccactaaccaaactccgcgctaaaccggcagtaccagtggcagggaaataccgcctaatagatatccctgtcagtaactgcattaattcggaaatttttaaaatctacgtattaacacaatttaactcagcttctctcaatcgccacattgcccgtacctacaactttagtggttttagcgagggttttgtggaagtgctggccgcccagcagacaccagagaaccctaactggttccaaggtacagccgatgctgtacgtcagtatctctggatgttacaagagtgggacgtagatgaatttttgatcctgtcgggggatcacctgtaccggatggactatcgcctatttatccagcgccatcgagaaaccaatgcggatatcacactttccgtaattcccattgatgatcgccgcgcctcggattttggtttaatgaaaatcgataactctggacgagtcattgatttcagtgaaaaacccaagggcgaagccttaaccaaaatgcgtgttgataccacggttttaggcttgacaccagaacaggcggcatcacagccttacattgcctcgatggggatttacgtatttaaaaaagacgttttgatcaagctgttgaaggaagctttagaacgtactgatttcggcaaagaaattattcctgatgccgccaaagatcacaacgttcaagcttacctattcgatgactactgggaagatattgggacaatcgaagctttttataacgccaatttagcgttaactcagcagcccatgccgccctttagcttctacgatgaagaagcacctatttatacccgcgctcgttacttaccacccacaaaactattagattgccacgttacagaatcaatcattggcgaaggctgtattctgaaaaactgtcgcattcaacactcagtattgggagtgcgatcgcgtattgaaactggctgcatgatcgaagaatctttactcatgggtgccgacttctaccaagcttcagtggaacgccagtgcagcatcgataaaggagacatccctgtaggcatcggtccagatacaatcattcgccgtgccatcatcgataaaaatgcccgcatcggtcacgatgtcaaaattatcaataaagacaacgtgcaagaagccgaccgcgaaagtcaaggattttacatccgcagtggcattgtcgtcgtcctcaaaaatgccgttattacagatggcacaatcatttag

SEQ ID NO: 35 - DNA, 1398 bp, Synechococcus elongatus PCC 7942
atgcggattctgttcgtggctgccgaatgtgctcccttcgccaaagtgggaggcatgggagatgtggttggttccctgcccaaagtgctgaaagctctgggccatgatgtccgaatcttcatgccgtactacggctttctgaacagtaagctcgatattcccgctgaaccgatctggtggggctacgcgatgtttaatcacttcgcggtttacgaaacgcagctgcccggttcagatgtgccgctctacttaatggggcatccagcttttgatccgcatcgcatctactcaggagaagacgaagactggcgcttcacgttttttgccaatggggctgctgaattttcttggaactactggaaaccacaagtcattcactgccacgattggcacactgggatgattccggtttggatgcaccagtccccggatatctcgactgtcttcaccattcataacttggcctaccaagggccgtggcgctggaagctcgagaaaatcacctggtgcccttggtacatgcagggcgacagcaccatggcggcggccttgctctatgccgatcgcgtcaacacggtatcgcccacctatgcccagcagattcaaacaccgacctacggtgaaaagctggagggtcttctctcatttatcagtggcaagctaagcggcatccttaacgggattgatgttgatagctacaaccctgcaacggatacgcggattgtggccaactacgatcgcgacactcttgataaacgactgaacaataagctggcgctccaaaaggagatggggcttgaggtcaatcccgatcgcttcctgattggctttgtggctcgtctagtcgagcagaagggcattgacttgctgctgcaaattcttgatcgctttctgtcttacagcgatgcccaatttgttgtcttaggaacgggcgagcgctactacgaaacccagctctgggagttggcgacccgctatccgggccggatgtccacttatctgatgtacgacgaggggctgtcgcgacgcatttatgccggtagcgacgccttcttggtgccctctcgttttgaaccttgcggtatcacgcaaatgctggcactgcgctacggcagtgtgccgattgtgcgccgtacgggggggttggtcgatacggtcttccaccacgatccgcgtcatgccgagggcaatggctattgcttcgatcgctacgagccgctggacctctatacctgtctggtgcgggcttgggagagttaccagtaccagccccaatggcaaaagctacagcaacggggtatggccgttgatctgagctggaaacaatcggcgatcgcctacgaacagctctacgctgaagcgattgggctaccgatcgatgtcttacaggaggcctag

SEQ ID NO: 36 - DNA, 1434 bp, Synechocystis sp. PCC 6803
atgaagattttatttgtggcggcggaagtatcccccctagcaaaggtaggtggcatgggggatgtggtgggttccctgcctaaagttctgcatcagttgggccatgatgtccgtgtcttcatgccctactacggtttcatcggcgacaagattgatgtgcccaaggagccggtctggaaaggggaagccatgttccagcagtttgctgtttaccagtcctatctaccggacaccaaaattcctctctacttgttcggccatccagctttcgactcccgaaggatctatggcggagatgacgaggcgtggcggttcacttttttttctaacggggcagctgaatttgcctggaaccattggaagccggaaattatccattgccatgattggcacactggcatgatccctgtttggatgcatcagtccccagacatcgccaccgttttcaccatccataatcttgcttaccaagggccctggcggggcttgcttgaaactatgacttggtgtccttggtacatgcagggagacaatgtgatggcggcggcgattcaatttgccaatcgggtgactaccgtttctcccacctatgcccaacagatccaaaccccggcctatggggaaaagctggaagggttattgtcctacctgagtggtaatttagtcggtattctcaacggtattgatacggagatttacaacccggcggaagaccgctttatcagcaatgttttcgatgcggacagtttggacaagcgggtgaaaaataaaattgccatccaggaggaaacggggttagaaattaatcgtaatgccatggtggtgggtatagtggctcgcttggtggaacaaaaggggattgatttggtgattcagatccttgaccgcttcatgtcctacaccgattcccagttaattatcctcggcactggcgatcgccattacgaaacccaactttggcagatggcttcccgatttcctgggcggatggcggtgcaattactccacaacgatgccctttcccgtcgagtctatgccggggcggatgtgtttttaatgccttctcgctttgagccctgtgggctgagtcaattgatggccatgcgttatggctgtatccccattgtgcggcggacagggggtttggtggatacggtatccttctacgatcctatcaatgaagccggcaccggctattgctttgaccgttatgaacccctggattgctttacggccatggtgcgggcctgggagggtttccgtttcaaggcagattggcaaaaattacagcaacgggccatgcgggcagactttagttggtaccgttccgccggggaatatatcaaagtttataagggcgtggtggggaaaccggaggaattaagccccatggaagaggaaaaaatcgctgagttaactgcttcctatcgctaa

SEQ ID NO: 37 - DNA, 1437 bp, Synechococcus sp. PCC 7002
atgcgtattttgtttgtttctgccgaggctgctcccatcgctaaagctggaggcatgggagatgtggtgggatcactgcctaaagttttacggcagttaggacatgacgcgagaattttcttaccctattacggctttctcaacgacaaactcgacatccctgcagaacccgtttggtggggcagtgcgatgttcaatacttttgccgtttatgaaactgtgttgcccaacaccgatgtccccctttatctgtttggccatcccgcctttgatggacggcatatttatggtgggcaggatgaattttggcgctttaccttttttgccaatggggccgctgaatttatgtggaaccactggaaaccccagatcgcccactgtcacgactggcacacgggcatgattccggtatggatgcaccaatcgccggatatcagtacggtgtttacgatccacaacttagcctaccaagggccttggcggggtttcctggagcgcaatacttggtgtccctggtatatggatggtgataacgtgatggcttcggcgctgatgtttgccgatcaggtgaacaccgtatctcccacctatgcccaacaaatccaaaccaaagtctatggtgaaaaattagagggtttgttgtcttggatcagtggcaaaagtcgcggcatcgtgaatggtattgacgtagaactttataatccttctaacgatcaagccctggtgaagcaattttctacgactaatcttgaggatcgggccgccaacaaagtgattatccaagaagaaacggggctagaggtcaactccaaggcttttttgatggcgatggtcacccgcttagtggaacaaaagggcattgatctgctgctaaatatcctggagcagtttatggcatacactgacgcccagctcattatcctcggcactggcgatcgccactacgaaacccaactctggcagactgcctaccgctttaaggggcggatgtccgtgcaactgctctataatgatgccctctcccgccggatttacgctggatccgatgtctttttgatgccgtcacgctttgagccctgtggcattagtcaaatgatggcgatgcgctacggttctgtaccgattgtgcggcgcaccgggggtttggtggatacggtctctttccatgatccgattcaccaaaccgggacaggctttagttttgaccgctacgaaccgctggatatgtacacctgcatggtgcgggcttgggaaagtttccgctacaaaaaagactgggctgaactacaaagacgaggcatgagccatgactttagttggtacaaatctgccggggaatatctcaagatgtaccgccaaagcattaaagaagctccggaattaacgaccgatgaagccgaaaaaatcacctatttagtgaaaaaacacgccatttaa

SEQ ID NO: 38 - DNA, 1542 bp, Synechococcus sp. WH8102
atgcgcatcctcttcgctgccgcggaatgcgccccgatgatcaaggtcggtggcatgggggatgtggtgggatcgctgcctccggctctggccaagcttggccacgacgtgcggctgatcatgccgggctactccaagctctggaccaagctgacgatctcggacgaacccatctggcgcgcccagacgatgggtacggaattcgcggtttacgagacgaagcatccaggcaatgggatgaccatctacctggtgggacatccggtgttcgatcccgagcggatctatggcggtgaagatgaggactggcgcttcaccttctttgccagtgccgccgctgaattcgcctggaatgtctggaagccgaatgttcttcactgccacgactggcacaccggcatgattccggtctggatgcaccaggacccggagatcagcacggtcttcaccatccacaacctcaagtaccagggcccctggcgttggaagctggatcgcatcacctggtgcccctggtacatgcagggagatcacaccatggcggcggcacttctgtacgccgaccgggtcaacgccgtctcccccacctacgccgaggaaatccgtacggcggagtacggcgaaaagctggatggtttgctcaatttcgtctccggcaagctgcgcggcatcctcaatggcattgacctcgaggcctggaacccccagaccgatggggctctgccggccaccttcagcgccgacgacctctccggtaaagcggtctgcaagcgggtgttgcaggagcgcatgggtcttgaggtgcgtgacgacgcctttgtcctcggcatggtcagccgactcgtcgatcagaagggcgtcgatctgcttctgcaggtggcggaccgtttgctcgcctacaccgacacgcagatcgtggtgctcggcaccggtgaccgtggcctggaatccggcctgtggcagctggcctcccgccatgccggccgttgcgccgtcttcctcacctacgacgacgacctctcccgactgatctatgccggcagtgacgccttcctgatgcccagtcgcttcgagccctgcggcatcagccagctgtacgccatgcgttacggctccgttcctgtggtgcgcaaggtgggcggcctggtggacaccgttcctccccacagtccagctgatgccagcgggaccggcttctgcttcgatcgttttgagccggtcgacttctacaccgcattggtgcgtgcctgggaggcctaccgccatcgcgacagctggcaggagttgcagaagcgcggcatgcagcaggactacagctgggaccgttcggccatcgattacgacgtcatgtaccgcgatgtctgcggtctgaaggaacccacccctgatgccgcgatggtggaacagttctcccagggacaggctgcggatccctcccgcccagaggatgatgcgatcaatgctgctcccgaggcggtcaccgcgccgtccggccccagccgcaacccccttaatcgtctcttcggccgcagggccgactga

SEQ ID NO: 39 - DNA, 1524 bp, Synechococcus sp RCC 307
atgcgcatcctctttgctgcggccgaatgcgcaccgatggtgaaagtcggcggcatgggagatgtggtgggatctctgcctccagccctcgctgagttgggtcacgacgtgcgcgtgatcatgcccggctacggcaagctctggtcccagcttgatgtgcccagcgagccgatctggcgtgcccaaaccatgggcaccgattttgctgtctatgagacccgtcaccccaagaccgggctcacgatctatttggtgggccatccggtttttgatggtgagcgcatctatggaggtgaagacgaggactggcgcttcaccttcttcgctagcgccacctccgaatttgcctggaacgcttggaagccccaggtgctgcattgccatgactggcacaccggcatgattccggtgtggatgcaccaagaccccgagatcagcacggtcttcaccatccacaacctcaaatatcaaggtccctggcgctggaagctcgagcgcatgacctggtgcccctggtacatgcagggcgaccacaccatggcggcagccttgctgtatgccgaccgcgtcaatgcggtttcacccacctacgcccaagagatccgcacgccggaatacggcgaacaactggaggggttgctgaactacatcagcggcaagctgcgaggcatcctcaatggcatcgatgtggaggcttggaatcccgccactgattcgcggattccggccacctacagcactgctgacctcagtggcaaagccgtctgcaagcgggctctgcaagagcgcatggggcttcaggtgaaccccgacacctttgtgatcggtttggtgagccgtttggtggaccaaaaaggcgtcgacctgctgctgcaggttgccgaacgcttccttgcctacaccgatacgcagatcgttgtgttgggcaccggggatcgccatttggaatcgggcctgtggcaaatggcgagtcagcacagcggccgcttcgcttccttcctcacctacgacgatgatctctcccggctgatctacgccggcagtgatgccttcttgatgccctcgcgctttgagccctgcggcatcagccagttgctctcgatgcgctacggcaccatcccggtggtgcgccgcgtcggtggactggtcgacaccgtgcctccctatgttcccgccacccaagagggcaatggcttctgcttcgaccgctatgaagcgatcgacctttacaccgccttggtgcgcgcctgggaggcctaccgccatcaagacagctggcagcaattgatgaagcgggtgatgcaggttgatttcagctgggctcgttccgccttggaatacgaccgcatgtatcgcgatgtttgcggaatgaaggagcccacgccggaagccgatgcggtggcggccttctccattccccagccgcctgaacagcaggccgcacgtgctgccgctgaagccgctgaccccaacccccaacggcgctttaatccccttggattgctgcgccgaaacggcggttga

SEQ ID NO: 40 - DNA, 1383 bp, Trichodesmium erythraeum IMS 101
atgcgaattttatttgtgtctgctgaagcgactcctttagcaaaagttggtggtatggcagatgtagtgggtgccttacccaaagtactacggaaaatgggtcacgatgttcgtatcttcatgccttattatggctttttaggcgacaagatggaagttcctgaggaacctatctgggaaggaacggccatgtatcaaaactttaagatttatgagacggtactaccaaaaagtgacgtgccattgtacctatttggtcacccggctttttggccacgtcatatttactatggagatgatgaggactggagattcactctatttgctaatggggcggccgagttttgctggaatggctggaaaccagagatagttcattgtaatgactggcacactggcatgattccagtttggatgcacgaaactccagacattaaaaccgtatttactattcataacctagcttatcaaggaccttggcgctggtacttggaaagaattacttggtgtccttggtacatggaagggcataatacaatggcagcagcagttcagtttgcagatcgggtaactactgtttctccaacctatgctagtcagatccaaacacctgcctacggagaaaatctagatggtttaatgtcttttattacggggaaactacacggtatcctcaatggtattgatatgaacttttataatccagctaatgacagatatattcctcaaacttatgatgtcaataccctggaaaaacgggttgacaataaaattgctcttcaagaagaagtaggttttgaagttaacaaaaatagctttctcatgggaatggtctcccgactggtagaacaaaaaggacttgatttaatgctgcaagtcttagatcggtttatggcttatactgatactcagtttattttgttgggtacaggcgatcgcttctatgaaacccaaatgtggcaaatagcaagtcgttatcctggtcggatgagtgtccaacttttacataatgatgccctttcccgacgaatatatgcaggtactgatgctttcttaatgcccagtcgatttgagccttgtggtattagtcagttattggcaatgcgttatggtagtatacctattgtccgtcgcacaggtgggttagttgatactgtctctttctatgatcctattaataatgtaggtactggctattcttttgatcgctatgaaccactagacctgcttactgcaatggtccgagcctatgaaggtttccggttcaaagatcaatggcaggagttacagaagcgtggcatgagagagaactttagctgggataagtcagctcaaggttatatcaaaatgtacaaatcaatgctcggattacctgaagaataa

SEQ ID NO: 41 - DNA, 1419 bp, Anabaena variabilis
atgcggattctatttgtggcagcagaagcagcacccatcgcaaaagtaggagggatgggtgatgttgtcggtgcattacctaaggtcttgagaaaaatggggcatgatgtgcgtatcttcttgccctattacggctttttgccagacaaaatggaaattcccaaagatccaatctggaagggatacgccatgtttcaggactttacagttcacgaagcagttctgcctggtactgatgttcccttgtatttatttggacatccagccttcaacccccggcgaatttattcgggagatgatgaagactggcggttcaccttgttttccaatggtgcggcggaattttgttggaattactggaaaccagaaattattcactgtcacgattggcacacaggcatgattcctgtgtggatgaaccaatcaccagatatcaccacagtcttcactatccacaacctagcttaccaagggccttggcgttggtatctagataaaattacttggtgtccttggtatatgcagggacacaacacaatggcggcggctgtccagtttgctgacagagtaaataccgtttctcctacatacgccgagcaaatcaagaccccggcttacggtgagaaaatagaaggcttgctgtctttcatcagtggtaaattatctgggattgttaacggtatagatacggaagtttatgacccagctaatgataaatttattgctcaaacttttactgctgatactttagataaacgcaaagccaacaaaattgctttacaagaagaagtagggttagaagttaacagcaatgcctttttaattggcatggtgacaaggttagtcgagcagaagggtttagatttagtcatccaaatgctcgatcgctttatggcttatactgatgctcagttcgtcttgttaggaacaggcgatcgctactacgaaactcaaatgtggcaattagcatcccgctaccccggacgtatggccacctatctcctatacaatgatgccctatcccgccgcatctacgccggttctgatgcctttttaatgcccagccgctttgaaccatgcggtattagccagatgatggctttacgctacggttccatccccatcgttcgccgcactgggggtttagttgacaccgtatcccaccacgaccccgtaaacgaagccggtacaggctactgctttgaccgctacgaacccctagacttattcacctgcatgattcgcgcctgggaaggcttccgctacaaaccccaatggcaagaactacaaaagcgtggtatgagtcaagacttcagctggtacaaatccgctaaggaatacgacagactctatcgctcaatatacggtttgccagaagcagaagagacacagccagagttaattctggcaaatcagtag

SEQ ID NO: 42 - DNA, 1419 bp, Nostoc sp. PCC 7120
atgcggattctatttgtggcagcagaagcagcacccattgcaaaagtaggagggatgggtgatgttgtcggtgcattacctaaggtcttgagaaaaatggggcatgatgtacgtatcttcttgccctattacggctttttgccagacaaaatggagattcccaaagatccaatatggaagggatacgccatgtttcaggactttacagttcacgaagcagttctgcctggtactgatgttcccttgtatttatttggacatccagcctttaccccccggcggatttattcgggagatgatgaagactggcgcttcaccttgttttccaatggtgcggctgagttttgctggaattactggaaacccgacattattcactgtcatgattggcacacgggcatgattcctgtgtggatgaaccaatcaccagatatcaccacagtcttcactatccacaatctggcttaccaagggccttggcgttggtatttagataaaattacttggtgtccttggtatatgcagggacacaacacaatggcggcggctgtccagtttgcggacagggtaaatacagtttctcccacatacgccgagcaaatcaagaccccggcttacggtgagaaaatagaaggtttgctgtctttcatcagtggtaaattatctgggattgttaacggtatagatacggaagtttacgacccagctaatgataaatatattgctcaaacgttcactgccgatactttagataaacgcaaagccaacaaaattgctttacaagaagaagtaggattagaagttaacagcaatgcctttttaattggcatggtgacaaggttagtcgagcagaagggcttagatttagtcatccaaatgctcgatcgctttatggcttatactgatgctcagttcgtcttgttgggaacaggcgatcgctactacgaaacccaaatgtggcaattagcatcccgctaccccggtcgtatggctacttacctcctgtataacgatgccctatctcgccgcatctacgctggtactgatgcctttttgatgcccagtcgctttgaaccatgcggtattagtcaaatgatggctttacgctacggttccattcccatcgtccgccgcactggaggcttggttgacaccgtatcccaccacgaccccatcaacgaagcaggtacaggctactgcttcgaccgctacgaacccctcgacttatttacctgcatgattcgcgcctgggaaggcttccgctacaaaccacaatggcaagaactacaaaaacgcggtatgagtcaagacttcagctggtacaaatccgctaaggaatacgacaaactctatcgctcaatgtacggtttgccagacccagaagagacacagccggagttaattctgacaaatcagtag

SEQ ID NO: 43 - DNA, 1953 bp, Synechococcus elongatus PCC 7942 0918
atggtgactggaaccgccctcgcgcaaccccgcgccattacgccccacgaacagcagcttttggccaaactgaaaagctatcgcgatatccaaagcttgtcgcaaatttggggacgtgctgccagtcaatttggatcgatgccggctttggttgcaccccatgccaaaccagcgatcaccctcagttatcaagaattggcgattcagatccaagcgtttgcagccggactgctcgcgctgggagtgcctacctccacagccgatgactttccgcctcgcttggcgcagtttgcggataacagcccccgctggttgattgctgaccaaggcacgttgctggcaggggctgccaatgcggtgcgcggcgcccaagctgaagtatcggagctgctctacgtcttagaggacagcggttcgatcggcttgattgtcgaagacgcggcgctgctgaagaaactacagcctggtttagcgtcactatcgctgcagtttgtgatcgtgctcagcgatgaagtagtcgagatcgacagcctgcgcgtcgttggttttagtgacgtgctggagatggggcgatcgctgccggcaccggagccaattttgcagctcgatcgcttagccactttgatctatacctcgggcaccacaggcccaccgaagggcgtgatgctttctcacggcaacctgctgcaccaagtcacaacattaggtgtggttgtgcagccgcaacctggcgacaccgtgctgagtattttgccgacttggcactcctacgagcgagcttgtgaatatttcctgctctcccagggctgcacacaggtctacacgacgctgcgcaatgtcaaacaagacatccggcagtatcggccgcagttcatggtcagtgtgctgcgcctctgggaatcgatctacgagggcgtgcagaagcagtttcgcgagcaaccggcgaagaaacgtcgcttgatcgataccttctttggcttgagtcaacgctatgttttggcacggcgccgctggcaaggactggatttgctggcactgaaccaatccccagcccagcgcctcgctgagggtgtccggatgttggcgctagcaccgttgcataagctgggcgatcgcctcgtctacggcaaagtacgagaagccacgggtggccgaattcggcaggtgatcagtggcggtggctcactggcactgcacctcgataccttcttcgaaattgttggtgttgatttgctggtgggttatggcttgacagaaacctcaccagtgctgacggggcgacggccttggcacaacctacggggttcggccggtcagccgattccaggtacggcgattcggatcgtcgatcctgaaacgaaggaaaaccgacccagtggcgatcgcggcttggtgctggcgaaagggccgcaaatcatgcagggctacttcaataaacccgaggcgaccgcgaaagcgatcgatgccgaaggttggtttgacaccggcgacttaggctacatcgtcggtgaaggcaacttggtgctaacggggcgcgctaaggacacgatcgtgctgaccaatggcgaaaacattgaaccccagccgattgaagatgcctgcctacgaagttcctatatcagccaaatcatgttggtgggacaagaccgcaagagtttgggggcgttgattgtgcccaatcaagaggcgatcgcactctgggccagcgaacagggcatcagccaaaccgatctgcagggagtggtacagaagctgattcgcgaggaactgaaccgcgaagtgcgcgatcgcccgggctaccgcatcgacgatcgcattggaccattccgcctcatcgaagaaccgttcagcatggaaaatggccagctaacccaaaccctgaaaatccgtcgcaacgttgtcgcggaacactacgcggctatgatcgacgggatgtttgaatcggcgagttaa

SEQ ID NO: 44 - protein, 650 aa, Synechococcus elongatus PCC 7942 0918
MVTGTALAQPRAITPHEQQLLAKLKSYRDIQSLSQIWGRAASQFGSMPALVAPHAKPAITLSYQELAIQIQAFAAGLLALGVPTSTADDFPPRLAQFADNSPRWLIADQGTLLAGAANAVRGAQAEVSELLYVLEDSGSIGLIVEDAALLKKLQPGLASLSLQFVIVLSDEVVEIDSLRVVGFSDVLEMGRSLPAPEPILQLDRLATLIYTSGTTGPPKGVMLSHGNLLHQVTTLGVVVQPQPGDTVLSILPTWHSYERACEYFLLSQGCTQVYTTLRNVKQDIRQYRPQFMVSVLRLWESIYEGVQKQFREQPAKKRRLIDTFFGLSQRYVLARRRWQGLDLLALNQSPAQRLAEGVRMLALAPLHKLGDRLVYGKVREATGGRIRQVISGGGSLALHLDTFFEIVGVDLLVGYGLTETSPVLTGRRPWHNLRGSAGQPIPGTAIRIVDPETKENRPSGDRGLVLAKGPQIMQGYFNKPEATAKAIDAEGWFDTGDLGYIVGEGNLVLTGRAKDTIVLTNGENIEPQPIEDACLRSSYISQIMLVGQDRKSLGALIVPNQEAIALWASEQGISQTDLQGVVQKLIREELNREVRDRPGYRIDDRIGPFRLIEEPFSMENGQLTQTLKIRRNVVAEHYAAMIDGMFESAS

SEQ ID NO: 45 - protein, 325 aa, Synechococcus sp. PCC7002
MPKTERRTFLLDFEKPLSELESRIHQIRDLAAENNVDVSEQIQQLEARADQLREEIFSTLTPAQRLQLARHPRRPSTLDYVQMMADEWFELHGDRGGSDDPALIGGVARFDGQPVMMLGHQKGRDTKDNVARNFGMPAPGGYRKAMRLMDHANRFGMPILTFIDTPGAWAGLEAEKLGQGEAIAFNLREMFSLDVPIICTVIGEGGSGGALGIGVGDRVLMLKNSVYTVATPEACAAILWKDAGKSEQAAAALKITAEDLKSLEIIDEIVPEPASCAHADPIGAAQLLKAAIQDNLQALLKLTPERRRELRYQRFRKIGVFLESS

SEQ ID NO: 46 - protein, 165 aa, Synechococcus sp. PCC 7002
MAINLQEIQELLSTIGQTNVTEFELKTDDFELRVSKGTVVAAPQTMVMSEAIAQPAMSTPVVSQATATPEASQAETPAPSVSIDDKWVAITSPMVGTFYRAPAPGEDPFVAVGDRVGNGQTVCIIEAMKLMNEIEAEVSGEVVKIAVEDGEPIEFGQTLMWVNPT

SEQ ID NO: 47 - protein, 448 aa, Synechococcus sp. PCC 7002
MQFSKILIANRGEVALRIIHTCQELGIATVAVHSTVDRQALHVQLADESICIGPPQSSKSYLNIPNIIAAALSSNADAIHPGYGFLAENAKFAEICADHQITFIGPSPEAMIAMGDKSTAKKTMQAAKVPTVPGSAGLVASEEQALEIAQQIGYPVMIKATAGGGGRGMRLVPSAEELPRLYRAAQGEAEAAFGNGGVYIEKFIERPRHIEFQILADQYGNVIHLGERDCSIQRRHQKLLEEAPSAILTPRLRDKMGKAAVKAAKSIDYVGAGTVEFLVDKNGDFYFMEMNTRIQVEHPVTEMVTGLDLIAEQIKVAQGDRLSLNQNQVNLNGHAIECRINAEDPDHDFRPTPGKISGYLPPGGPGVRMDSHVYTDYEISPYYDSLIGKLIVWGPDRDTAIRRMKRALRECAITGVSTTISFHQKILNHPAFLAADVDTNFIQQHMLP

SEQ ID NO: 48 - protein, 319 aa, Synechococcus sp. PCC 7002
MSLFDWFAANRQNSETQLQPQQEREIADGLWTKCKSCDALTYTKDLRNNQMVCKECGFHNRVGSRERVRQLIDEGTWTEISQNVAPTDPLKFRDKKAYSDRLKDYQEKTNLTDAVITGTGLIDGLPLALAVMDFGFMGGSMGSVVGEKICRLVEHGTAEGLPVVVVCASGGARMQEGMLSLMQMAKISGALERHRTKKLLYIPVLTNPTTGGVTASFAMLGDLILAEPKATIGFAGRRVIEQTLREKLPDDFQTSEYLLQHGFVDAIVPRTELKKTLAQMISLHQPFHPILPELQLAPHVEKEKVYEPIASTSTNDFYK

SEQ ID NO: 49 - protein, 2311 aa, Triticum aestivum
MGSTHLPIVGLNASTTPSLSTIRPVNSAGAAFQPSAPSRTSKKKSRRVQSLRDGGDGGVSDPNQSIRQGLAGIIDLPKEGTSAPEVDISHGSEEPRGSYQMNGILNEAHNGRHASLSKVVEFCMALGGKTPIHSVLVANNGRAAAKFMRSVRTWANETFGSEKAIQLIAMATPEDMRINAEHIRIADQFVEVPGGTNNNNYANVQLIVEIAVRTGVSAVWPGWGHASENPELPDALNANGIVFLGPPSSSMNALGDKVGSALIAQAAGVPTLPWGGSQVEIPLEVCLDSIPAEMYRKACVSTTEEALASCQMIGYPAMIKASWGGGGKGIRKVNNDDDVRALFKQVQGEVPGSPIFIMRLASQSRHLEVQLLCDQYGNVAALHSRDCSVQRRHQKIIEEGPVTVAPRETVKELEQAARRLAKAVGYVGAATVEYLYSMETGEYYFLELNPRLQVEHPVTEWIAEVNLPAAQVAVGMGIPLWQVPEIRRFYGMDNGGGYDIWRETAALATPFNFDEVDSQWPKGHCVAVRITSEDPDDGFKPTGGKVKEISFKSKPNVWAYFSVKSGGGIHEFADSQFGHVFAYGVSRAAAITNMSLALKEIQIRGEIHSNVDYTVDLLNASDFKENRIHTGWLDNRIAMRVQAERPPWYISVVGGALYKTITSNTDTVSEYVSYLVKGQIPPKHISLVHSTVSLNIEESKYTIETIRSGQGSYRLRMNGSVIEANVQTLCDGGLLMQLDGNSHVIYAEEEAGGTRLLIDGKTYLLQNDHDPSRLLAETPCKLLRFLVADGAHVEADVPYAEVEVMKMCMPLLSPAAGVINVLLSEGQPMQAGDLIARLDLDDPSAVKRAEPFNGSFPEMSLPIAASGQVHKRCATSLNAARMVLAGYDHPINKVVQDLVSCLDAPELPFLQWEELMSVLATRLPRLLKSELEGKYSEYKLNVGHGKSKDFPSKMLREIIEENLAHGSEKEIATNERLVEPLMSLLKSYEGGRESHAHFIVKSLFEDYLSVEELFSDGIQSDVIERLRQQHSKDLQKVVDIVLSHQGVRNKTKLILTLMEKLVYPNPAVYKDQLTRFSSLNHKRYYKLALKASELLEQTKLSELRTSIARSLSELEMFTEERTAISEIMGDLVTAPLPVEDALVSLFDCSDQTLQQRVIETYISRLYQPHLVKDSIQLKYQESGVIALWEFAEAHSEKRLGAMVIVKSLESVSAAIGAALKGTSRYASSEGNIMHIALLGADNQMHGTEDSGDNDQAQVRIDKLSATLEQNTVTADLRAAGVKVISCIVQRDGALMPMRHTFLLSDEKLCYGEEPVLRHVEPPLSALLELGKLKVKGYNEVKYTPSRDRQWNIYTLRNTENPKMLHRVFFRTLVRQPGASNKFTSGNISDVEVGGAEESLSFTSSSILRSLMTAIEELELHAIRTGHSHMFLCILKERKLLDLVPVSGNKVVDIGQDEATACLLLKEMALQIHELVGARMHHLSVCQWEVKLKLDSDGPASGTWRVVTTNVTSHTCTVDIYREVEDTESQKLVYHSAPSSSGPLHGVALNTPYQPLSVIDLKRCSARNNRTTYCYDFPLAFETAVQKSWSNISSDNNRCYVKATELVFAHKNGSWGTPVIPMERPAGLNDIGMVAWILDMSTPEYPNGRQIVVIANDITFRAGSFGPREDAFFETVTNLACERRLPLIYLAANSGARIGIADEVKSCFRVGWSDDGSPERGFQYIYLTEEDHARISASVIAHKMQLDNGEIRWVIDSVVGKEDGLGVENIHGSAAIASAYSRAYEETFTLTFVTGRTVGIGAYLARLGIRCIQRTDQPIILTGFSALNKLLGREVYSSHMQLGGPKIMATNGVVHLTVSDDLEGVSNILRWLSYVPANIGGPLPITKSLDPPDRPVAYIPENTCDPRAAISGIDDSQGKWLGGMFDKDSFVETFEGWAKSVVTGRAKLGGIPVGVIAVETQTMMQLIPADPGQLDSHERSVPRAGQVWFPDSATKTAQAMLDFNREGLPLFILANWRGFSGGQRDLFEGILQAGSTIVENLRAYNQPAFVYIPKAAELRGGAWVVIDSKINPDRIEFYAERTAKGNVLEPQGLIEIKFRSEELQECMGRLDPELINLKAKLQGVKHENGSLPESESLQKSIEARKKQLLPLYTQIAVRFAELHDTSLRMAAKGVIKKVVDWEDSRSFFYKRLRRRISEDVLAKEIRGVSGKQFSHQSAIELIQKWYLASKGAETGSTEWDDDDAFVAWRENPENYQEYIKEPRAQRVSQLLSDVADSSPDLEALPQGLSMLLEKMDPAKREIVEDFEINLVK

SEQ ID NO: 50 - DNA, 978 bp, Synechococcus sp. PCC 7002
atgccgaaaacggagcgccggacgtttctgcttgattttgaaaaacctctttcggaattagaatcacgcatccatcaaattcgtgatcttgctgcggagaataatgttgatgtttcagaacagattcagcagctagaggcgcgggcagaccagctccgggaagaaatttttagtaccctcaccccggcccaacggctgcaattggcacggcatccccggcgtcccagcacccttgattatgttcaaatgatggcggacgaatggtttgaactccatggcgatcgcggtggatctgatgatccggctctcattggcggggtggcccgcttcgatggtcaaccggtgatgatgctagggcaccaaaaaggacgggatacgaaggataatgtcgcccgcaattttggcatgccagctcctgggggctaccgtaaggcgatgcggctgatggaccatgccaaccgttttgggatgccgattttaacgtttattgatactcctggggcttgggcgggtttagaagcggaaaagttgggccaaggggaggcgatcgcctttaacctccgggaaatgtttagcctcgatgtgccgattatttgcacggtcattggcgaaggcggttccggtggggccttagggattggcgtgggcgatcgcgtcttgatgttaaaaaattccgtttacacagtggcgaccccagaggcttgtgccgccattctctggaaagatgccgggaaatcagagcaggccgccgccgccctcaagattacagcagaggatctgaaaagccttgagattatcgatgaaattgtcccagagccagcctcctgcgcccacgccgatcccattggggccgcccaactcctgaaagcagcgatccaagataacctccaagccttgctgaagctgacgccagaacgccgccgtgaattgcgctaccagcggttccggaaaattggtgtgtttttagaaagttcctaa

SEQ ID NO: 51 - DNA, 498 bp, Synechococcus sp.  PCC 7002
atggctattaatttacaagagatccaagaacttctatccaccatcggccaaaccaatgtcaccgagtttgaactcaaaaccgatgattttgaactccgtgtgagcaaaggtactgttgtggctgctccccagacgatggtgatgtccgaggcgatcgcccaaccagcaatgtccactcccgttgtttctcaagcaactgcaaccccagaagcctcccaagcggaaaccccggctcccagtgtgagcattgatgataagtgggtcgccattacctcccccatggtgggaacgttttaccgcgcgccggcccctggtgaagatcccttcgttgccgttggcgatcgcgttggcaatggtcaaaccgtttgcatcatcgaagcgatgaaattaatgaatgagattgaggcagaagtcagcggtgaagttgttaaaattgccgttgaagacggtgaacccattgaatttggtcagaccctaatgtgggtcaacccaacctaa

SEQ ID NO: 52 - DNA, 1347 bp, Synechococcus sp. PCC 7002
atgcagttttcaaagattctcatcgccaatcgcggagaagttgccctacgcattatccacacctgtcaggagctcggcattgccacagttgccgtccactccaccgtagatcgccaagccctccacgttcagctcgccgatgagagcatttgcattggcccgccccagagcagcaaaagctatctcaacattcccaatattatcgctgcggccctcagcagtaacgccgacgcaatccacccaggctacggtttcctcgctgaaaatgccaagtttgcagaaatttgtgccgaccaccaaatcaccttcattggcccttccccagaagcaatgatcgccatgggggacaaatccaccgccaaaaaaacgatgcaggcggcaaaagtccctaccgtacccggtagtgctgggttggtggcctccgaagaacaagccctagaaatcgcccaacaaattggctaccctgtgatgatcaaagccacggcgggtggtggtggccgggggatgcgccttgtgcccagcgctgaggagttaccccgtttgtaccgagcggcccagggggaagcagaagcagcctttgggaatggcggcgtttacatcgaaaaatttattgaacggccccgtcacatcgaatttcagatcctcgcggatcagtacggcaatgtaattcacctcggcgaacgggattgttcgatccaacggcggcaccaaaaactcctcgaagaagctcccagcgcgatcctcacccccagactgcgggacaaaatggggaaagcggcagtaaaagcggcgaaatccattgattatgtcggggcggggacggtggaattcctcgtggataagaatggggatttctactttatggaaatgaatacccgcattcaggtggaacacccggtcacagagatggtgacgggactagatctgatcgccgagcaaattaaagttgcccaaggcgatcgcctcagtttgaatcaaaatcaagtgaacttgaatggtcatgccatcgagtgccggattaatgccgaagatcccgaccatgatttccgaccgaccccaggcaaaatcagtggctatcttccccccggtggccctggggtacggatggattcccacgtttacaccgactatgaaatttctccttactacgattctttgatcggtaaattaatcgtttggggaccagaccgagacaccgccattcgccgcatgaagcgggcactccgagaatgtgccattactggagtatcgaccaccattagcttccaccaaaagattttgaatcatccggcttttttggcggccgatgtcgatacaaactttatccagcagcacatgttgccctag

SEQ ID NO: 53 - DNA, 960 bp, Synechococcus sp. PCC 7002
atgtctctttttgattggtttgccgcaaatcgccaaaattctgaaacccagctccagccccaacaggagcgcgagattgccgatggcctctggacgaaatgcaaatcctgcgatgctctcacctacactaaagacctccgcaacaatcaaatggtctgtaaagagtgtggcttccataaccgggtcggcagtcgggaacgggtacgccaattgattgacgaaggcacctggacagaaattagtcagaatgtcgcgccgaccgaccccctgaaattccgcgacaaaaaagcctatagcgatcgcctcaaagattaccaagagaaaacgaacctcaccgatgctgtaatcactggcacaggactgattgacggtttaccccttgctttggcagtgatggactttggctttatgggcggcagcatgggatccgttgtcggcgaaaaaatttgtcgcctcgtagaacatggcaccgccgaaggtttacccgtggtggttgtttgtgcttctggtggagcaagaatgcaagagggcatgctcagtctgatgcagatggcgaaaatctctggtgccctcgaacgccatcgcaccaaaaaattactctacatccctgttttgactaatcccaccaccgggggcgtcaccgctagctttgcgatgttgggcgatttgattcttgccgaacccaaagcaaccatcggttttgctggacgccgcgtcattgaacaaacattgcgcgaaaaacttcctgacgattttcagacatctgaatatttactccaacatgggtttgtggatgcgattgtgccccgcactgaattgaaaaaaaccctcgcccaaatgattagtctccatcagccctttcacccgattctgccagagctacaattggctccccatgtggaaaaagaaaaagtttacgaacccattgcctctacttcaaccaacgacttttacaagtag

SEQ ID NO: 54 - DNA, 6936 bp, Triticum aestivum
atgggatccacacatttgcccattgtcggccttaatgcctcgacaacaccatcgctatccactattcgcccggtaaattcagccggtgctgcattccaaccatctgccccttctagaacctccaagaagaaaagtcgtcgtgttcagtcattaagggatggaggcgatggaggcgtgtcagaccctaaccagtctattcgccaaggtcttgccggcatcattgacctcccaaaggagggcacatcagctccggaagtggatatttcacatgggtccgaagaacccaggggctcctaccaaatgaatgggatactgaatgaagcacataatgggaggcatgcttcgctgtctaaggttgtcgaattttgtatggcattgggcggcaaaacaccaattcacagtgtattagttgcgaacaatggaagggcagcagctaagttcatgcggagtgtccgaacatgggctaatgaaacatttgggtcagagaaggcaattcagttgatagctatggctactccagaagacatgaggataaatgcagagcacattagaattgctgatcaatttgttgaagtacccggtggaacaaacaataacaactatgcaaatgtccaactcatagtggagatagcagtgagaaccggtgtttctgctgtttggcctggttggggccatgcatctgagaatcctgaacttccagatgcactaaatgcaaacggaattgtttttcttgggccaccatcatcatcaatgaacgcactaggtgacaaggttggttcagctctcattgctcaagcagcaggggttccgactcttccttggggtggatcacaggtggaaattccattagaagtttgtttggactcgatacctgcggagatgtataggaaagcttgtgttagtactacggaggaagcacttgcgagttgtcagatgattgggtatccagccatgattaaagcatcatggggtggtggtggtaaagggatccgaaaggttaataacgacgatgatgtcagagcactgtttaagcaagtgcaaggtgaagttcctggctccccaatatttatcatgagacttgcatctcagagtcgacatcttgaagttcagttgctttgtgatcaatatggcaatgtagctgcgcttcacagtcgtgactgcagtgtgcaacggcgacaccaaaagattattgaggaaggaccagttactgttgctcctcgcgagacagtgaaagagctagagcaagcagcaaggaggcttgctaaggctgtgggttatgttggtgctgctactgttgaatatctctacagcatggagactggtgaatactattttctggaacttaatccacggttgcaggttgagcatccagtcaccgagtggatagctgaagtaaacttgcctgcagctcaagttgcagttggaatgggtatacccctttggcaggttccagagatcagacgtttctatggaatggacaatggaggaggctatgacatttggagggaaacagcagctcttgctactccatttaacttcgatgaagtggattctcaatggccaaagggtcattgtgtagcagttaggataaccagtgaggatccagatgacggattcaagcctaccggtggaaaagtaaaggagatcagttttaaaagcaagccaaatgtttgggcctatttctctgttaagtccggtggaggcattcatgaatttgctgattctcagtttggacatgtttttgcatatggagtgtctagagcagcagcaataaccaacatgtctcttgcgctaaaagagattcaaattcgtggagaaattcattcaaatgttgattacacagttgatctcttgaatgcctcagacttcaaagaaaacaggattcatactggctggctggataacagaatagcaatgcgagtccaagctgagagacctccgtggtatatttcagtggttggaggagctctatataaaacaataacgagcaacacagacactgtttctgaatatgttagctatctcgtcaagggtcagattccaccgaagcatatatcccttgtccattcaactgtttctttgaatatagaggaaagcaaatatacaattgaaactataaggagcggacagggtagctacagattgcgaatgaatggatcagttattgaagcaaatgtccaaacattatgtgatggtggacttttaatgcagttggatggaaacagccatgtaatttatgctgaagaagaggccggtggtacacggcttctaattgatggaaagacatacttgttacagaatgatcacgatccttcaaggttattagctgagacaccctgcaaacttcttcgtttcttggttgccgatggtgctcatgttgaagctgatgtaccatatgcggaagttgaggttatgaagatgtgcatgcccctcttgtcacctgctgctggtgtcattaatgttttgttgtctgagggccagcctatgcaggctggtgatcttatagcaagacttgatcttgatgacccttctgctgtgaagagagctgagccatttaacggatctttcccagaaatgagccttcctattgctgcttctggccaagttcacaaaagatgtgccacaagcttgaatgctgctcggatggtccttgcaggatatgatcacccgatcaacaaagttgtacaagatctggtatcctgtctagatgctcctgagcttcctttcctacaatgggaagagcttatgtctgttttagcaactagacttccaaggcttcttaagagcgagttggagggtaaatacagtgaatataagttaaatgttggccatgggaagagcaaggatttcccttccaagatgctaagagagataatcgaggaaaatcttgcacatggttctgagaaggaaattgctacaaatgagaggcttgttgagcctcttatgagcctactgaagtcatatgagggtggcagagaaagccatgcacactttattgtgaagtcccttttcgaggactatctctcggttgaggaactattcagtgatggcattcagtctgatgtgattgaacgcctgcgccaacaacatagtaaagatctccagaaggttgtagacattgtgttgtctcaccagggtgtgagaaacaaaactaagctgatactaacactcatggagaaactggtctatccaaaccctgctgtctacaaggatcagttgactcgcttttcctccctcaatcacaaaagatattataagttggcccttaaagctagcgagcttcttgaacaaaccaagcttagtgagctccgcacaagcattgcaaggagcctttcagaacttgagatgtttactgaagaaaggacggccattagtgagatcatgggagatttagtgactgccccactgccagttgaagatgcactggtttctttgtttgattgtagtgatcaaactcttcagcagagggtgatcgagacgtacatatctcgattataccagcctcatcttgtcaaggatagtatccagctgaaatatcaggaatctggtgttattgctttatgggaattcgctgaagcgcattcagagaagagattgggtgctatggttattgtgaagtcgttagaatctgtatcagcagcaattggagctgcactaaagggtacatcacgctatgcaagctctgagggtaacataatgcatattgctttattgggtgctgataatcaaatgcatggaactgaagacagtggtgataacgatcaagctcaagtcaggatagacaaactttctgcgacactggaacaaaatactgtcacagctgatctccgtgctgctggtgtgaaggttattagttgcattgttcaaagggatggagcactcatgcctatgcgccataccttcctcttgtcggatgaaaagctttgttatggggaagagccggttctccggcatgtggagcctcctctttctgctcttcttgagttgggtaagttgaaagtgaaaggatacaatgaggtgaagtatacaccgtcacgtgatcgtcagtggaacatatacacacttagaaatacagagaaccccaaaatgttgcacagggtgtttttccgaactcttgtcaggcaacccggtgcttccaacaaattcacatcaggcaacatcagtgatgttgaagtgggaggagctgaggaatctctttcatttacatcgagcagcatattaagatcgctgatgactgctatagaagagttggagcttcacgcgattaggacaggtcactctcatatgtttttgtgcatattgaaagagcgaaagcttcttgatcttgttcccgtttcagggaacaaagttgtggatattggccaagatgaagctactgcatgcttgcttctgaaagaaatggctctacagatacatgaacttgtgggtgcaaggatgcatcatctttctgtatgccaatgggaggtgaaacttaagttggacagcgatgggcctgccagtggtacctggagagttgtaacaaccaatgttactagtcacacctgcactgtggatatctaccgtgaggttgaagatacagaatcacagaaactagtataccactctgctccatcgtcatctggtcctttgcatggcgttgcactgaatactccatatcagcctttgagtgttattgatctgaaacgttgctccgctagaaacaacagaactacatactgctatgattttccgttggcatttgaaactgcagtgcagaagtcatggtctaacatttctagtgacaataaccgatgttatgttaaagcaacggagctggtgtttgctcacaagaatgggtcatggggcactcctgtaattcctatggagcgtcctgctgggctcaatgacattggtatggtagcttggatcttggacatgtccactcctgaatatcccaatggcaggcagattgttgtcatcgcaaatgatattacttttagagctggatcgtttggtccaagggaagatgcattttttgaaactgttaccaacctagcttgtgagaggaggcttcctctcatctacttggcagcaaactctggtgctcggatcggcatagcagatgaagtaaaatcttgcttccgtgttggatggtctgatgatggcagccctgaacgtgggtttcaatatatttatctgactgaagaagaccatgctcgtattagcgcttctgttatagcgcacaagatgcagcttgataatggtgaaattaggtgggttattgattctgttgtagggaaggaggatgggctaggtgtggagaacatacatggaagtgctgctattgccagtgcctattctagggcctatgaggagacatttacgcttacatttgtgactggaaggactgttggaataggagcatatcttgctcgacttggcatacggtgcattcagcgtactgaccagcccattatcctaactgggttttctgccttgaacaagcttcttggccgggaagtgtacagctcccacatgcagttgggtggccccaaaattatggcgacaaacggtgttgtccatctgacagtttcagatgaccttgaaggtgtatctaatatattgaggtggctcagctatgttcctgccaacattggtggacctcttcctattacaaaatctttggacccacctgacagacccgttgcttacatccctgagaatacatgcgatcctcgtgctgccatcagtggcattgatgatagccaagggaaatggttggggggcatgttcgacaaagacagttttgtggagacatttgaaggatgggcgaagtcagttgttactggcagagcgaaactcggagggattccggtgggtgttatagctgtggagacacagactatgatgcagctcatccctgctgatccaggccagcttgattcccatgagcgatctgttcctcgtgctgggcaagtctggtttccagattcagctactaagacagcgcaggcaatgctggacttcaaccgtgaaggattacctctgttcatccttgctaactggagaggcttctctggtggacaaagagatctttttgaaggaatccttcaggctgggtcaacaattgttgagaaccttagggcatacaatcagcctgcctttgtatatatccccaaggctgcagagctacgtggaggggcttgggtcgtgattgatagcaagataaatccagatcgcattgagttctatgctgagaggactgcaaagggcaatgttctcgaacctcaagggttgatcgagatcaagttcaggtcagaggaactccaagagtgcatgggtaggcttgatccagaattgataaatctgaaggcaaagctccagggagtaaagcatgaaaatggaagtctacctgagtcagaatcccttcagaagagcatagaagcccggaagaaacagttgttgcctttgtatactcaaattgcggtacggttcgctgaattgcatgacacttcccttagaatggctgctaagggtgtgattaagaaggttgtagactgggaagattctaggtcgttcttctacaagagattacggaggaggatatccgaggatgttcttgcgaaggaaattagaggtgtaagtggcaagcagttttctcaccaatcggcaatcgagctgatccagaaatggtacttggcctctaagggagctgaaacaggaagcactgaatgggatgatgacgatgcttttgttgcctggagggaaaaccctgaaaactaccaggagtatatcaaagaacccagggctcaaagggtatctcagttgctctcagatgttgcagactccagtccagatctagaagccttgccacagggtctttctatgctactagagaagatggatcctgcaaagagggaaattgttgaagactttgaaataaaccttgtaaagtaa

SEQ ID NO: 55 - protein, 2235 aa, Saccharomyces cerevisiae
MEFSEESLFESSPQKMEYEITNYSERHTELPGHFIGLNTVDKLEESPLRDFVKSHGGHTVISKILIANNGIAAVKEIRSVRKWAYETFGDDRTVQFVAMATPEDLEANAEYIRMADQYIEVPGGTNNNNYANVDLIVDIAERADVDAVWAGWGHASENPLLPEKLSQSKRKVIFIGPPGNAMRSLGDKISSTIVAQSAKVPCIPWSGTGVDTVHVDEKTGLVSVDDDIYQKGCCTSPEDGLQKAKRIGFPVMIKASEGGGGKGIRQVEREEDFIALYHQAANEIPGSPIFIMKLAGRARHLEVQLLADQYGTNISLFGRDCSVQRRHQKIIEEAPVTIAKAETFHEMEKAAVRLGKLVGYVSAGTVEYLYSHDDGKFYFLELNPRLQVEHPTTEMVSGVNLPAAQLQIAMGIPMHRISDIRTLYGMNPHSASEIDFEFKTQDATKKQRRPIPKGHCTACRITSEDPNDGFKPSGGTLHELNFRSSSNVWGYFSVGNNGNIHSFSDSQFGHIFAFGENRQASRKHMVVALKELSIRGDFRTTVEYLIKLLETEDFEDNTITTGWLDDLITHKMTAEKPDPTLAVICGAATKAFLASEEARHKYIESLQKGQVLSKDLLQTMFPVDFIHEGKRYKFTVAKSGNDRYTLFINGSKCDIILRQLSDGGLLIAIGGKSHTIYWKEEVAATRLSVDSMTTLLEVENDPTQLRTPSPGKLVKFLVENGEHIIKGQPYAEIEVMKMQMPLVSQENGIVQLLKQPGSTIVAGDIMAIMTLDDPSKVKHALPFEGMLPDFGSPVIEGTKPAYKFKSLVSTLENILKGYDNQVIMNASLQQLIEVLRNPKLPYSEWKLHISALHSRLPAKLDEQMEELVARSLRRGAVFPARQLSKLIDMAVKNPEYNPDKLLGAVVEPLADIAHKYSNGLEAHEHSIFVHFLEEYYEVEKLFNGPNVREENIILKLRDENPKDLDKVALTVLSHSKVSAKNNLILAILKHYQPLCKLSSKVSAIFSTPLQHIVELESKATAKVALQAREILIQGALPSVKERTEQIEHILKSSVVKVAYGSSNPKRSEPDLNILKDLIDSNYVVFDVLLQFLTHQDPVVTAAAAQVYIRRAYRAYTIGDIRVHEGVTVPIVEWKFQLPSAAFSTFPTVKSKMGMNRAVSVSDLSYVANSQSSPLREGILMAVDHLDDVDEILSQSLEVIPRHQSSSNGPAPDRSGSSASLSNVANVCVASTEGFESEEEILVRLREILDLNKQELINASIRRITFMFGFKDGSYPKYYTFNGPNYNENETIRHIEPALAFQLELGRLSNFNIKPIFTDNRNIHVYEAVSKTSPLDKRFFTRGIIRTGHIRDDISIQEYLTSEANRLMSDILDNLEVTDTSNSDLNHIFINFIAVFDISPEDVEAAFGGFLERFGKRLLRLRVSSAEIRIIIKDPQTGAPVPLRALINNVSGYVIKTEMYTEVKNAKGEWVFKSLGKPGSMHLRPIATPYPVKEWLQPKRYKAHLMGTTYVYDFPELFRQASSSQWKNFSADVKLTDDFFISNELIEDENGELTEVEREPGANAIGMVAFKITVKTPEYPRGRQFVVVANDITFKIGSFGPQEDEFFNKVTEYARKRGIPRIYLAANSGARIGMAEEIVPLFQVAWNDAANPDKGFQYLYLTSEGMETLKKFDKENSVLTERTVINGEERFVIKTIIGSEDGLGVECLRGSGLIAGATSRAYHDIFTITLVTCRSVGIGAYLVRLGQRAIQVEGQPIILTGAPAINKMLGREVYTSNLQLGGTQIMYNNGVSHLTAVDDLAGVEKIVEWMSYVPAKRNMPVPILETKDTWDRPVDFTPTNDETYDVRWMIEGRETESGFEYGLFDKGSFFETLSGWAKGVVVGRARLGGIPLGVIGVETRTVENLIPADPANPNSAETLIQEPGQVWHPNSAFKTAQAINDFNNGEQLPMMILANWRGFSGGQRDMFNEVLKYGSFIVDALVDYKQPIIIYIPPTGELRGGSWVVVDPTINADQMEMYADVNARAGVLEPQGMVGIKFRREKLLDTMNRLDDKYRELRSQLSNKSLAPEVHQQISKQLADRERELLPIYGQISLQFADLHDRSSRMVAKGVISKELEWTEARRFFFWRLRRRLNEEYLIKRLSHQVGEASRLEKIARIRSWYPASVDHEDDRQVATWIEENYKTLDDKLKGLKLESFAQDLAKKIRSDHDNAIDGLSEVIKMLSTDDKEKLLKTLK

SEQ ID NO: 56 - DNA, 6708 bp, Artificial Sequence
  Codon-optimized S. cerevisiae acetyl Coa carboxylase (ACC1)
atggaattctccgaggaaagtttgttcgaaagcagtccgcagaaaatggaatatgaaattacgaattattcggaacgccacacggagctccccgggcacttcatcggactcaacaccgtggataagctcgaagaaagtcccctccgcgattttgtgaaaagccacggcggccataccgtgatctcgaagattctgattgccaataacggaattgccgctgtcaaggagatccgcagcgtccggaagtgggcgtacgaaacttttggcgatgaccgtacagtccagtttgttgctatggcgactccggaagacttggaggcgaatgcggaatacattcgaatggccgatcaatacatcgaagtccccggaggaacgaacaacaacaattatgcgaacgtcgatttgatcgtggatatcgcagaacgcgcggacgtggatgctgtttgggccggatggggccacgcttcggaaaaccctctgttgccggaaaaactcagccagtctaaacggaaagtcattttcatcggccctccgggcaacgcaatgcgctcgttgggtgataagatcagctcgaccattgtggctcagagcgctaaagtcccatgtattccctggtcgggtaccggcgtggatacggtccatgttgatgagaaaactggactggtcagcgtcgatgatgatatctaccaaaagggctgttgcaccagcccggaagatggcctgcaaaaggcgaagcgcatcgggttcccagtcatgatcaaggcatccgaaggcggaggcggtaagggtatccgccaggttgagcgtgaagaagattttatcgcactgtatcatcaagcggctaacgaaatcccgggctcgccaattttcattatgaaactggctggtcgggcgcgtcatctcgaagtgcaactcctcgctgaccagtacggtacgaacatctctttgttcggtcgggattgttcggtccagcgtcgtcaccagaagatcattgaagaagcccctgttaccatcgcaaaggccgagacgtttcatgagatggagaaagcggccgtccgcctcggcaagctggtcggttacgttagcgcaggcaccgtggaatacctctattcccacgacgatggtaagttttactttctcgaactgaatcctcgcctgcaggttgaacacccgaccacagagatggtgtcgggggtcaatctgccggctgcgcagttgcagattgcaatgggcattccgatgcatcgaatcagcgacatccgaaccctgtacggcatgaacccgcacagtgcgagcgaaatcgactttgagttcaagacccaagacgccacgaagaaacagcgacgcccaattccgaagggccattgcaccgcgtgtcgcattacctcggaggaccccaatgatggttttaagccctcgggcggtactctgcacgagctcaacttccgctcctcctcgaacgtctggggctatttcagcgtcggaaataatggtaacattcatagtttttccgattcccaatttggccatatcttcgcctttggcgaaaaccgacaagctagccgcaaacacatggtcgtggcgttgaaggagctgagtatccgaggggactttcgcacgacggtggaatatctgatcaaactgctcgaaacggaggactttgaggataacacaattaccaccggatggttggacgacctgattacgcacaaaatgaccgccgagaaacccgaccccaccttggcagtgatttgtggcgcggcaacgaaggcctttttggcctctgaagaggcacgccacaagtacattgagagtctccaaaagggtcaggtgctgagtaaagatctgctgcaaaccatgtttcctgtcgactttattcatgaggggaaacgctacaaattcacggttgctaagtctggtaatgatcggtacacattgtttatcaatggatcgaagtgcgatattatcttgcgacaactctccgacggcggcctcctgattgctatcggcgggaaaagtcataccatctattggaaagaagaggtcgccgccacccgactgagcgttgattcgatgactactctgctcgaagttgaaaacgatccaacgcaactgcgcactccctctccgggtaagctcgtgaagtttctcgtcgagaatggcgaacacattattaagggccagccgtatgcggaaatcgaggtgatgaagatgcagatgcccctggtcagccaagagaacggtattgtgcaactgctgaaacagcccggcagcaccatcgtcgctggcgatatcatggctatcatgaccctcgatgatccttccaaagtcaaacatgccctgcccttcgaaggcatgctccccgattttggctcccccgtgattgagggcaccaaaccagcttacaagtttaaatcgctggtttccaccctcgagaacatcttgaagggctacgataatcaggtcattatgaatgccagcctccagcagctcattgaggtcctccgtaaccccaagctgccctacagtgaatggaagctccacatcagtgcgctccactcgcgactgcccgcgaagctcgatgagcagatggaagagctcgtcgctcgcagcctgcgtcgcggcgcagtctttccggcacggcaactgtcgaagctcatcgatatggctgtcaaaaaccccgaatacaaccccgataaactcttgggtgctgtcgttgagccgctcgccgatatcgcgcacaagtacagtaatggcctggaggcgcacgaacacagtatctttgttcacttcctggaagaatactatgaggttgagaaactgttcaatgggcctaatgtccgggaagagaatattatcctgaagctccgtgatgaaaatccgaaagatttggataaagtcgccttgacggtgctcagtcatagcaaggtgagtgccaagaacaatctcatcctggcgatcttgaaacactaccaacctttgtgcaagctgagttccaaggtgtcggctatttttagtacgcccctgcagcacatcgtggaactcgaaagtaaagccaccgccaaggtggctctgcaggcccgggagattctgatccagggtgctctgccgagcgtgaaagagcggacggaacaaatcgaacacatcctgaagagttcggtcgtgaaggttgcatatggcagcagtaaccctaaacgctcggaaccggacctcaatatcctgaaggatctgatcgatagtaattatgttgtttttgatgtcctgctccaatttctgactcaccaagatccggttgttactgcggctgccgcgcaagtttacattcgacgcgcctatcgcgcctacacaatcggcgatattcgagtccatgagggcgtgaccgttccaatcgttgaatggaaattccagttgccatcggcggctttttctacattcccaacagtcaagagtaagatgggcatgaatcgtgccgtttcggtcagtgatttgtcctatgtcgcaaactcgcaatctagtcctctgcgagagggcatcctgatggcagtggatcatttggatgatgtcgatgagatcctctcgcaaagtctcgaggtcattcctcgccaccaatcgtcgtccaatggcccagctcccgatcgatccggttcttccgccagcttgtcgaatgtcgccaacgtctgtgtggcgtcgactgaggggttcgaaagcgaagaagaaattttggtccgcttgcgggaaattttggacctcaacaagcaggaactgattaatgcctctattcgccgcattacgtttatgttcggtttcaaggatggctcgtacccaaaatactatacgttcaacggcccgaactacaatgagaacgagactatccgacatattgaacctgccctcgctttccaactggaactggggcggctctcgaatttcaatattaagcctatttttaccgacaaccgtaacatccacgtttacgaggctgtcagcaaaacaagcccgctggataagcgattcttcacccggggcattatccgcacaggccacatccgtgacgatatcagtatccaagaatacctgactagcgaagctaaccgcttgatgagcgacattttggataatctggaagtgactgatacttccaacagcgacttgaatcacatttttatcaacttcattgccgtgttcgatatctcgccggaagatgtggaagccgcgtttggaggctttctggaacggtttggcaaacggctgctgcgcttgcgggtgtctagcgcggagattcggattatcatcaaagatccgcaaacgggggctcctgtgccactgcgcgcgctgattaataacgtctcgggttacgtgatcaagaccgagatgtacacagaggttaaaaacgctaaaggcgagtgggtcttcaagagcttgggcaaacccggcagcatgcatctccgccccatcgccacgccgtatccggtcaaggagtggctgcagcccaagcgatacaaggcgcacttgatggggacgacatatgtttacgattttcctgaactgttccgtcaagcaagcagctcccagtggaaaaacttttccgcagatgtgaaattgactgatgatttcttcatctcgaatgagctcatcgaagatgagaatggcgagctgaccgaagttgagcgagaacctggtgccaatgcgattgggatggtcgcctttaaaatcacggtcaaaactcccgagtaccctcggggtcgccagttcgtcgttgtggctaacgatatcacctttaagattggatcgtttggcccgcaggaggatgagttctttaacaaggtcactgaatacgcccgaaaacgaggcattccgcggatttacttggcagccaatagcggtgcgcgcatcggcatggctgaagaaatcgttccgctgtttcaggttgcctggaacgacgcggccaaccccgacaaggggttccagtacttgtatctgacttccgaaggcatggagacgttgaagaaatttgataaggagaatagtgtcttgactgagcggaccgttattaacggcgaggagcggtttgtcattaagactatcatcggcagcgaagatggcctcggcgtcgaatgtttgcgcgggtccggcctgatcgcaggggcaacctcgcgagcctatcacgatatctttaccattactttggtcacgtgtcgttcggttggcattggagcatacctcgtgcgcctcggtcagcgcgccatccaagtggaaggccaacctatcattttgactggcgcgcctgctatcaataagatgctgggccgtgaagtctacacatcgaacctccaactgggcggtacccaaattatgtataacaatggcgtcagccatctgacagccgtcgatgacctggctggcgttgaaaagattgttgagtggatgagctatgtgcccgccaaacggaacatgccagtccccattttggaaaccaaggatacctgggatcgcccagtggatttcactccgactaatgatgaaacctacgatgtccgctggatgatcgaagggcgcgaaactgagtcgggcttcgagtacggactgtttgataagggtagtttctttgagactctcagtggttgggccaaaggcgttgtcgtcggtcgggcacgtctgggcggcatcccgctgggagttattggtgttgagacacgtacggtggaaaatctgatcccggctgatccggccaaccccaatagtgcggaaacgctgattcaagagcccgggcaagtgtggcacccgaatagtgcctttaagacggcgcaggctattaatgattttaacaacggcgaacaactgcctatgatgattctggcgaattggcgggggtttagtggtgggcagcgcgacatgttcaacgaagtgctcaagtacggctccttcatcgtggacgccctggtcgactataaacaaccaattatcatctatattccccctaccggcgagctgcgaggcggtagctgggtcgtggtggaccctactattaatgcagatcaaatggagatgtacgccgacgtgaatgctcgagcgggcgtgctggaaccacaagggatggttggcatcaaattccgccgcgaaaaactgttggatactatgaatcgactggatgataaatatcgcgagctgcgcagccaactgtcgaacaagtctctggccccggaagtccatcaacagatttctaaacagctggcagatcgcgaacgtgaactcttgccgatctacggccaaatcagcctccaatttgccgacctgcatgatcgcagcagccgcatggttgcgaaaggtgtcatcagcaaagagctcgagtggacggaagctcggcggtttttcttttggcggctgcgccgacgcctgaatgaagaatacttgattaagcgtctgagccaccaggtcggcgaggctagtcggttggaaaagatcgcccgcattcggagttggtatccggcatcggttgaccacgaggacgatcgccaggtcgctacctggatcgaagagaactacaaaaccttggatgataagctgaaaggactgaagctggagtctttcgcccaagatctcgccaagaagatccgtagcgatcatgacaatgcaatcgacggtttgagcgaggttatcaagatgttgtctaccgacgacaaggagaagctgctcaaaacgctgaagtag

SEQ ID NO: 57 - DNA, 6702 bp, Artificial Sequence
  Synthetic construct Saccharomyces cerevisiae clone FLH148869.01X ACC1
atgagcgaagaaagcttattcgagtcttctccacagaagatggagtacgaaattacaaactactcagaaagacatacagaacttccaggtcatttcattggcctcaatacagtagataaactagaggagtccccgttaagggactttgttaagagtcacggtggtcacacggtcatatccaagatcctgatagcaaataatggtattgccgccgtgaaagaaattagatccgtcagaaaatgggcatacgagacgttcggcgatgacagaaccgtccaattcgtcgccatggccaccccagaagatctggaggccaacgcagaatatatccgtatggccgatcaatacattgaagtgccaggtggtactaataataacaactacgctaacgtagacttgatcgtagacatcgccgaaagagcagacgtagacgccgtatgggctggctggggtcacgcctccgagaatccactattgcctgaaaaattgtcccagtctaagaggaaagtcatctttattgggcctccaggtaacgccatgaggtctttaggtgataaaatctcctctaccattgtcgctcaaagtgctaaagtcccatgtattccatggtctggtaccggtgttgacaccgttcacgtggacgagaaaaccggtctggtctctgtcgacgatgacatctatcaaaagggttgttgtacctctcctgaagatggtttacaaaaggccaagcgtattggttttcctgtcatgattaaggcatccgaaggtggtggtggtaaaggtatcagacaagttgaacgtgaagaagatttcatcgctttataccaccaggcagccaacgaaattccaggctcccccattttcatcatgaagttggccggtagagcgcgtcacttggaagttcaactgctagcagatcagtacggtacaaatatttccttgttcggtagagactgttccgttcagagacgtcatcaaaaaattatcgaagaagcaccagttacaattgccaaggctgaaacatttcacgagatggaaaaggctgccgtcagactggggaaactagtcggttatgtctctgccggtaccgtggagtatctatattctcatgatgatggaaaattctactttttagaattgaacccaagattacaagtcgagcatccaacaacggaaatggtctccggtgttaacttacctgcagctcaattacaaatcgctatgggtatccctatgcatagaataagtgacattagaactttatatggtatgaatcctcattctgcctcagaaatcgatttcgaattcaaaactcaagatgccaccaagaaacaaagaagacctattccaaagggtcattgtaccgcttgtcgtatcacatcagaagatccaaacgatggattcaagccatcgggtggtactttgcatgaactaaacttccgttcttcctctaatgtttggggttacttctccgtgggtaacaatggtaatattcactccttttcggactctcagttcggccatatttttgcttttggtgaaaatagacaagcttccaggaaacacatggttgttgccctgaaggaattgtccattaggggtgatttcagaactactgtggaatacttgatcaaacttttggaaactgaagatttcgaggataacactattaccaccggttggttggacgatttgattactcataaaatgaccgctgaaaagcctgatccaactcttgccgtcatttgcggtgccgctacaaaggctttcttagcatctgaagaagcccgccacaagtatatcgaatccttacaaaagggacaagttctatctaaagacctactgcaaactatgttccctgtagattttatccatgagggtaaaagatacaagttcaccgtagctaaatccggtaatgaccgttacacattatttatcaatggttctaaatgtgatatcatactgcgtcaactatctgatggtggtcttttgattgccataggcggtaaatcgcataccatctattggaaagaagaagttgctgctacaagattatccgttgactctatgactactttgttggaagttgaaaacgatccaacccagttgcgtactccatcccctggtaaattggttaaattcttggtggaaaatggtgaacacattatcaagggccaaccatatgcagaaattgaagttatgaaaatgcaaatgcctttggtttctcaagaaaatggtatcgtccagttattaaagcaacctggttctaccattgttgcaggtgatatcatggctattatgactcttgacgatccatccaaggtcaagcacgctctaccatttgaaggtatgctgccagattttggttctccagttatcgaaggaaccaaacctgcctataaattcaagtcattagtgtctactttggaaaacattttgaagggttatgacaaccaagttattatgaacgcttccttgcaacaattgatagaggttttgagaaatccaaaactgccttactcagaatggaaactacacatctctgctttacattcaagattgcctgctaagctagatgaacaaatggaagagttagttgcacgttctttgagacgtggtgctgttttcccagctagacaattaagtaaattgattgatatggccgtgaagaatcctgaatacaaccccgacaaattgctgggcgccgtcgtggaaccattggcggatattgctcataagtactctaacgggttagaagcccatgaacattctatatttgtccatttcttggaagaatattacgaagttgaaaagttattcaatggtccaaatgttcgtgaggaaaatatcattctgaaattgcgtgatgaaaaccctaaagatctagataaagttgcgctaactgttttgtctcattcgaaagtttcagcgaagaataacctgatcctagctatcttgaaacattatcaaccattgtgcaagttatcttctaaagtttctgccattttctctactcctctacaacatattgttgaactagaatctaaggctaccgctaaggtcgctctacaagcaagagaaattttgattcaaggcgctttaccttcggtcaaggaaagaactgaacaaattgaacatatcttaaaatcctctgttgtgaaggttgcctatggctcatccaatccaaagcgctctgaaccagatttgaatatcttgaaggacttgatcgattctaattacgttgtgttcgatgttttacttcaattcctaacccatcaagacccagttgtgactgctgcagctgctcaagtctatattcgtcgtgcttatcgtgcttacaccataggagatattagagttcacgaaggtgtcacagttccaattgttgaatggaaattccaactaccttcagctgcgttctccacctttccaactgttaaatctaaaatgggtatgaacagggctgtttctgtttcagatttgtcatatgttgcaaacagtcagtcatctccgttaagagaaggtattttgatggctgtggatcatttagatgatgttgatgaaattttgtcacaaagtttggaagttattcctcgtcaccaatcttcttctaacggacctgctcctgatcgttctggtagctccgcatcgttgagtaatgttgctaatgtttgtgttgcttctacagaaggtttcgaatctgaagaggaaattttggtaaggttgagagaaattttggatttgaataagcaggaattaatcaatgcttctatccgtcgtatcacatttatgttcggttttaaagatgggtcttatccaaagtattatacttttaacggtccaaattataacgaaaatgaaacaattcgtcacattgagccggctttggccttccaactggaattaggaagattgtccaacttcaacattaaaccaattttcactgataatagaaacatccatgtctacgaagctgttagtaagacttctccattggataagagattctttacaagaggtattattagaacgggtcatatccgtgatgacatttctattcaagaatatctgacttctgaagctaacagattgatgagtgatatattggataatttagaagtcaccgacacttcaaattctgatttgaatcatatcttcatcaacttcattgcggtgtttgatatctctccagaagatgtcgaagccgccttcggtggtttcttagaaagatttggtaagagattgttgagattgcgtgtttcttctgccgaaattagaatcatcatcaaagatcctcaaacaggtgccccagtaccattgcgtgccttgatcaataacgtttctggttatgttatcaaaacagaaatgtacaccgaagtcaagaacgcaaaaggtgaatgggtatttaagtctttgggtaaacctggatccatgcatttaagacctattgctactccttaccctgttaaggaatggttgcaaccaaaacgttataaggcacacttgatgggtaccacatatgtctatgacttcccagaattattccgccaagcatcgtcatcccaatggaaaaatttctctgcagatgttaagttaacagatgatttctttatttccaacgagttgattgaagatgaaaacggcgaattaactgaggtggaaagagaacctggtgccaacgctattggtatggttgcctttaagattactgtaaagactcctgaatatccaagaggccgtcaatttgttgttgttgctaacgatatcacattcaagatcggttcctttggtccacaagaagacgaattcttcaataaggttactgaatatgctagaaagcgtggtatcccaagaatttacttggctgcaaactcaggtgccagaattggtatggctgaagagattgttccactatttcaagttgcatggaatgatgctgccaatccggacaagggcttccaatacttatacttaacaagtgaaggtatggaaactttaaagaaatttgacaaagaaaattctgttctcactgaacgtactgttataaacggtgaagaaagatttgtcatcaagacaattattggttctgaagatgggttaggtgtcgaatgtctacgtggatctggtttaattgctggtgcaacgtcaagggcttaccacgatatcttcactatcaccttagtcacttgtagatccgtcggtatcggtgcttatttggttcgtttgggtcaaagagctattcaggtcgaaggccagccaattattttaactggtgctcctgcaatcaacaaaatgctgggtagagaagtttatacttctaacttacaattgggtggtactcaaatcatgtataacaacggtgtttcacatttgactgctgttgacgatttagctggtgtagagaagattgttgaatggatgtcttatgttccagccaagcgtaatatgccagttcctatcttggaaactaaagacacatgggatagaccagttgatttcactccaactaatgatgaaacttacgatgtaagatggatgattgaaggtcgtgagactgaaagtggatttgaatatggtttgtttgataaagggtctttctttgaaactttgtcaggatgggccaaaggtgttgtcgttggtagagcccgtcttggtggtattccactgggtgttattggtgttgaaacaagaactgtcgagaacttgattcctgctgatccagctaatccaaatagtgctgaaacattaattcaagaacctggtcaagtttggcatccaaactccgccttcaagactgctcaagctatcaatgactttaacaacggtgaacaattgccaatgatgattttggccaactggagaggtttctctggtggtcaacgtgatatgttcaacgaagtcttgaagtatggttcgtttattgttgacgcattggtggattacaaacaaccaattattatctatatcccacctaccggtgaactaagaggtggttcatgggttgttgtcgatccaactatcaacgctgaccaaatggaaatgtatgccgacgtcaacgctagagctggtgttttggaaccacaaggtatggttggtatcaagttccgtagagaaaaattgctggacaccatgaacagattggatgacaagtacagagaattgagatctcaattatccaacaagagtttggctccagaagtacatcagcaaatatccaagcaattagctgatcgtgagagagaactattgccaatttacggacaaatcagtcttcaatttgctgatttgcacgataggtcttcacgtatggtggccaagggtgttatttctaaggaactggaatggaccgaggcacgtcgtttcttcttctggagattgagaagaagattgaacgaagaatatttgattaaaaggttgagccatcaggtaggcgaagcatcaagattagaaaagatcgcaagaattagatcgtggtaccctgcttcagtggaccatgaagatgataggcaagtcgcaacatggattgaagaaaactacaaaactttggacgataaactaaagggtttgaaattagagtcattcgctcaagacttagctaaaaagatcagaagcgaccatgacaatgctattgatggattatctgaagttatcaagatgttatctaccgatgataaagaaaaattgttgaagactttgaaatag

SEQ ID NO: 58 - protein, 458 aa, Acinetobacter baylii sp.
MRPLHPIDFIFLSLEKRQQPMHVGGLFLFQIPDNAPDTFIQDLVNDIRISKSIPVPPFNNKLNGLFWDEDEEFDLDHHFRHIALPHPGRIRELLIYISQEHSTLLDRAKPLWTCNIIEGIEGNRFAMYFKIHHAMVDGVAGMRLIEKSLSHDVTEKSIVPPWCVEGKRAKRLREPKTGKIKKIMSGIKSQLQATPTVIQELSQTVFKDIGRNPDHVSSFQAPCSILNQRVSSSRRFAAQSFDLDRFRNIAKSLNVTINDVVLAVCSGALRAYLMSHNSLPSKPLIAMVPASIRNDDSDVSNRITMILANLATHKDDPLQRLEIIRRSVQNSKQRFKRMTSDQILNYSAVVYGPAGLNIISGMMPKRQAFNLVISNVPGPREPLYWNGAKLDALYPASIVLDGQALNITMTSYLDKLEVGLIACRNALPRMQNLLTHLEEEIQLFEGVIAKQEDIKTAN

SEQ ID NO: 59 - protein, 446 aa, Streptomyces coelicolor
MTPDPLAPLDLAFWNIESAEHPMHLGALGVFEADSPTAGALAADLLAARAPAVPGLRMRIRDTWQPPMALRRPFAFGGATREPDPRFDPLDHVRLHAPATDFHARAGRLMERPLERGRPPWEAHVLPGADGGSFAVLFKFHHALADGLRALTLAAGVLDPMDLPAPRPRPEQPPRGLLPDVRALPDRLRGALSDAGRALDIGAAAALSTLDVRSSPALTAASSGTRRTAGVSVDLDDVHHVRKTTGGTVNDVLIAVVAGALRRWLDERGDGSEGVAPRALIPVSRRRPRSAHPQGNRLSGYLMRLPVGDPDPLARLGTVRAAMDRNKDAGPGRGAGAVALLADHVPALGHRLGGPLVSGAARLWFDLLVTSVPLPSLGLRLGGHPLTEVYPLAPLARGHSLAVAVSTYRGRVHYGLLADAKAVPDLDRLAVAVAEEVETLLTACRP

SEQ ID NO: 60 - protein, 457 aa, Alcanivorax borkumensis
MKALSPVDQLFLWLEKRQQPMHVGGLQLFSFPEGAGPKYVSELAQQMRDYCHPVAPFNQRLTRRLGQYYWTRDKQFDIDHHFRHEALPKPGRIRELLSLVSAEHSNLLDRERPMWEAHLIEGIRGRQFALYYKIHHSVMDGISAMRIASKTLSTDPSEREMAPAWAFNTKKRSRSLPSNPVDMASSMARLTASISKQAATVPGLAREVYKVTQKAKKDENYVSIFQAPDTILNNTITGSRRFAAQSFPLPRLKVIAKAYNCTINTVVLSMCGHALREYLISQHALPDEPLIAMVPMSLRQDDSTGGNQIGMILANLGTHICDPANRLRVIHDSVEEAKSRFSQMSPEEILNFTALTMAPTGLNLLTGLAPKWRAFNVVISNIPGPKEPLYWNGAQLQGVYPVSIALDRIALNITLTSYVDQMEFGLIACRRTLPSMQRLLDYLEQSIRELEIGAGIK

SEQ ID NO: 61 - protein, 460 aa, Acinetobacter baylii sp.
MEFRPLHPIDFIFLSLEKRQQPMHVGGLFLFQIPDNAPDTFIQDLVNDIRISKSIPVPPFNNKLNGLFWDEDEEFDLDHHFRHIALPHPGRIRELLIYISQEHSTLLDRAKPLWTCNIIEGIEGNRFAMYFKIHHAMVDGVAGMRLIEKSLSHDVTEKSIVPPWCVEGKRAKRLREPKTGKIKKIMSGIKSQLQATPTVIQELSQTVFKDIGRNPDHVSSFQAPCSILNQRVSSSRRFAAQSFDLDRFRNIAKSLNVTINDVVLAVCSGALRAYLMSHNSLPSKPLIAMVPASIRNDDSDVSNRITMILANLATHKDDPLQRLEIIRRSVQNSKQRFKRMTSDQILNYSAVVYGPAGLNIISGMMPKRQAFNLVISNVPGPREPLYWNGAKLDALYPASIVLDGQALNITMTSYLDKLEVGLIACRNALPRMQNLLTHLEEEIQLFEGVIAKQEDIKTAN

SEQ ID NO: 62 - DNA, 1377 bp, Artificial Sequence
  Codon-optimized Acinetobacter baylii sp. atfA
atgcggcccttgcaccccattgacttcatctttctgagtttggagaaacggcaacagcccatgcatgtcggtggcttgtttctcttccaaatccccgataacgccccggacacctttattcaggatctggtcaatgatatccggatctcgaaatcgatccccgtgccgccgtttaataataaactgaacggcctcttttgggacgaagacgaggaatttgatctggatcaccattttcggcacatcgctttgccccacccgggtcggattcgcgaactcctgatctatattagccaagaacacagcacgttgttggaccgggccaaaccgctctggacgtgcaatatcatcgaaggcatcgaaggcaaccgctttgcgatgtacttcaagattcatcacgcgatggttgacggtgtcgctggcatgcgcctgatcgaaaaatcgctgagccatgatgtgaccgaaaagagtatcgtccccccctggtgcgtggaaggtaagcgcgccaagcgcctccgcgaaccgaaaacgggcaagattaagaaaatcatgagcggtatcaagtcgcagctgcaggctaccccgaccgtgatccaggagctgtcgcaaaccgtgtttaaggatattggtcggaacccggatcatgtcagtagtttccaagctccctgttcgatcttgaatcagcgcgttagcagcagccgccggttcgctgctcaaagttttgatctcgatcggtttcggaatattgccaagtcgctgaacgtcaccatcaatgatgtggttctcgcggtttgttcgggtgccctccgcgcgtatctgatgagccataacagtctccccagtaagccgctgattgctatggttcccgcgtcgattcggaatgacgacagcgatgtgagcaaccggattaccatgatcctggctaacctcgcgacccacaaagatgatccgttgcaacgcctggagattatccgccgcagtgtgcagaacagtaaacagcgcttcaaacggatgaccagtgatcaaattctgaattacagcgctgtggtctatggtcccgccggcttgaatattatcagtggtatgatgcccaaacgccaagcgtttaacttggtgatcagtaatgtgccgggtccgcgcgaacccttgtattggaacggtgctaaactcgatgccctctaccccgccagtatcgtgctcgatggccaggctctcaatattaccatgaccagctatctcgataaactcgaggtgggtttgattgcgtgccgcaacgcgctgccccgcatgcagaacttgctgacccacctggaagaggaaatccagctcttcgagggcgtgattgcgaagcaggaagatattaaaacggccaactag

SEQ ID NO: 63 - DNA, 1376 bp, Acinetobacter sp.
atgcgcccattacatccgattgattttatattcctgtcactagaaaaaagacaacagcctatgcatgtaggtggtttatttttgtttcagattcctgataacgccccagacacctttattcaagatctggtgaatgatatccggatatcaaaatcaatccctgttccaccattcaacaataaactgaatgggcttttttgggatgaagatgaagagtttgatttagatcatcattttcgtcatattgcactgcctcatcctggtcgtattcgtgaattgcttatttatatttcacaagagcacagtacgctgctagatcgggcaaagcccttgtggacctgcaatattattgaaggaattgaaggcaatcgttttgccatgtacttcaaaattcaccatgcgatggtcgatggcgttgctggtatgcggttaattgaaaaatcactctcccatgatgtaacagaaaaaagtatcgtgccaccttggtgtgttgagggaaaacgtgcaaagcgcttaagagaacctaaaacaggtaaaattaagaaaatcatgtctggtattaagagtcagcttcaggcgacacccacagtcattcaagagctttctcagacagtatttaaagatattggacgtaatcctgatcatgtttcaagctttcaggcgccttgttctattttgaatcagcgtgtgagctcatcgcgacgttttgcagcacagtcttttgacctagatcgttttcgtaatattgccaaatcgttgaatgtgaccattaatgatgttgtactagcggtatgttctggtgcattacgtgcgtatttgatgagtcataatagtttgccttcaaaaccattaattgccatggttccagcctctattcgcaatgacgattcagatgtcagcaaccgtattacgatgattctggcaaatttggcaacccacaaagatgatcctttacaacgtcttgaaattatccgccgtagtgttcaaaactcaaagcaacgcttcaaacgtatgaccagcgatcagattctaaattatagtgctgtcgtatatggccctgcaggactcaacataatttctggcatgatgccaaaacgccaagccttcaatctggttatttccaatgtgcctggcccaagagagccactttactggaatggtgccaaacttgatgcactctacccagcttcaattgtattagacggtcaagcattgaatattacaatgaccagttatttagataaacttgaagttggtttgattgcatgccgtaatgcattgccaagaatgcagaatttactgacacatttagaagaagaaattcaactatttgaaggcgtaattgcaaagcaggaagatattaaaacagccaatta

SEQ ID NO: 64 - DNA, 1341 bp, Artificial Sequence
  Codon-optimized Streptomyces coelicolor DGAT
atgacgcctgacccgttggctcccttggacttggctttctggaatatcgaaagtgccgagcacccgatgcacttgggggcactgggggtctttgaggcggatagtccaaccgctggtgcactcgccgcggatctcctggctgcccgcgctcccgcagtgcccgggctgcgcatgcggattcgcgatacatggcagccgcctatggcgctccgtcgcccttttgcttttggcggtgctacacgcgagcccgacccgcggtttgatccactcgatcatgtgcggctccatgccccagcgacggatttccacgcacgcgcaggtcggttgatggagcgccctctggaacgaggccgtcctccttgggaagcccatgtcctgccaggggctgacggtggatcgtttgcggtcttgtttaagttccatcatgccctggccgacggtctgcgggcgctgacgctggcggcgggcgtgctcgatccgatggatctccccgctccacggccccgcccagagcagcccccccgtggtctcctgccggatgtccgcgcgctgccggatcggctgcgaggggctctgtctgacgcgggccgcgcgttggacatcggcgccgccgcagccctcagcaccctggatgtgcggagcagtcccgctctgactgcggcgtcctcgggcacgcgacgtaccgccggcgtgtccgtggatctcgacgacgtgcaccatgttcgcaaaacgacaggcggtaccgttaacgatgttttgatcgccgttgttgccggggccctgcgacgctggctggatgaacgaggcgatgggtcggaaggcgtcgccccgcgcgccctcattcccgtcagccggcggcgacctcggagcgcacacccgcaaggcaaccgattgagtggctacctgatgcgcttgccggtcggcgacccggaccctctcgcacggttgggaaccgtccgtgccgcgatggatcgaaataaggatgcggggcccggccgcggagctggcgcagttgctctcttggcagaccacgttcctgccctgggccaccgcctgggtggacccctcgtctcgggcgctgctcgactgtggttcgatctgttggtcacgagcgtcccgttgccctctttgggtttgcgcctcggtgggcatccgctgaccgaagtgtacccactggcccccctggcccgtggccactccttggcggtggcggtgagcacttatcgcggtcgggttcattacggtctcctcgctgatgctaaagccgttcctgatctggatcgtctggcagtggccgtcgccgaggaggttgaaaccttgctcactgcgtgccgcccctag

SEQ ID NO: 65 - DNA, 1374 bp, Artificial Sequence
  Codon-optimized Alcanivorax borkumensis DGAT
atgaaagctttgagccccgttgatcagctgtttctgtggttggaaaaacggcagcaacccatgcatgtgggtgggttgcagctgttctcctttcccgaaggcgcggggccgaaatatgtctcggaactggcccaacagatgcgcgattattgtcaccctgtcgccccgttcaaccaacgtctgacacggcgcctggggcaatactactggacacgtgataagcaatttgacattgaccatcattttcggcacgaggccctgcccaaaccgggtcggattcgcgagttgctcagcttggtgagtgcggaacactccaacttgttggatcgtgaacgacccatgtgggaagcgcacctgatcgaaggaatccgcgggcgccaatttgccttgtattacaaaattcatcactccgtcatggacggtatctccgctatgcggattgcctctaagaccttgtccacggaccccagtgagcgggagatggcccccgcttgggcgtttaatactaagaagcgatcgcgcagcctgccaagcaatcccgtggatatggcgagctcgatggctcgactcactgcaagtatttcgaaacaagctgccaccgtgcccggcctggcacgagaggtctacaaggtgacccaaaaagctaaaaaggatgaaaattacgttagtattttccaagcaccagacaccatcctcaataatacgattacgggcagtcgacgcttcgccgctcagtcgttccctctcccccgtctgaaggttatcgctaaggcttacaactgcactattaacacggttgtgctctcgatgtgcggccacgccctgcgcgaatacctcatcagtcaacatgccctgccggatgaacccctgatcgcgatggtccctatgagcctgcgccaagatgatagcaccggaggcaaccagatcggaatgattttggcgaatctgggcacgcatatctgcgatcctgccaatcgcctgcgtgtcatccatgatagcgtggaggaggcgaaaagccgttttagccaaatgtctccggaggagattctgaactttacagcactcactatggcgccgaccggtctgaacttgctcaccggtttggctcccaaatggcgcgcatttaacgtcgttatctctaacatcccagggccaaaggaaccactgtactggaatggggcacagctccagggtgtgtatccggtctccatcgccttggatcggattgccctgaacattacactgacgtcttatgttgatcagatggagttcggcttgattgcgtgtcgccggaccctcccgtcgatgcaacgactcctcgactatctcgaacagagtatccgcgaactggagattggcgcgggcatcaaatag

SEQ ID NO: 66 - DNA, 1383 bp, Artificial Sequence
  Codon-optimized Acinetobacter baylii sp. DGATd
atggaattccggcccttgcaccccattgacttcatctttctgagtttggagaaacggcaacagcccatgcatgtcggtggcttgtttctcttccaaatccccgataacgccccggacacctttattcaggatctggtcaatgatatccggatctcgaaatcgatccccgtgccgccgtttaataataaactgaacggcctcttttgggacgaagacgaggaatttgatctggatcaccattttcggcacatcgctttgccccacccgggtcggattcgcgaactcctgatctatattagccaagaacacagcacgttgttggaccgggccaaaccgctctggacgtgcaatatcatcgaaggcatcgaaggcaaccgctttgcgatgtacttcaagattcatcacgcgatggttgacggtgtcgctggcatgcgcctgatcgaaaaatcgctgagccatgatgtgaccgaaaagagtatcgtccccccctggtgcgtggaaggtaagcgcgccaagcgcctccgcgaaccgaaaacgggcaagattaagaaaatcatgagcggtatcaagtcgcagctgcaggctaccccgaccgtgatccaggagctgtcgcaaaccgtgtttaaggatattggtcggaacccggatcatgtcagtagtttccaagctccctgttcgatcttgaatcagcgcgttagcagcagccgccggttcgctgctcaaagttttgatctcgatcggtttcggaatattgccaagtcgctgaacgtcaccatcaatgatgtggttctcgcggtttgttcgggtgccctccgcgcgtatctgatgagccataacagtctccccagtaagccgctgattgctatggttcccgcgtcgattcggaatgacgacagcgatgtgagcaaccggattaccatgatcctggctaacctcgcgacccacaaagatgatccgttgcaacgcctggagattatccgccgcagtgtgcagaacagtaaacagcgcttcaaacggatgaccagtgatcaaattctgaattacagcgctgtggtctatggtcccgccggcttgaatattatcagtggtatgatgcccaaacgccaagcgtttaacttggtgatcagtaatgtgccgggtccgcgcgaacccttgtattggaacggtgctaaactcgatgccctctaccccgccagtatcgtgctcgatggccaggctctcaatattaccatgaccagctatctcgataaactcgaggtgggtttgattgcgtgccgcaacgcgctgccccgcatgcagaacttgctgacccacctggaagaggaaatccagctcttcgagggcgtgattgcgaagcaggaagatattaaaacggccaactag

SEQ ID NO: 67 - DNA, 2535 bp, Synechococcus elongatus PCC 7942
atgagtgattccaccgcccaactcagctacgaccccaccacgagctacctcgagcccagtggcttggtctgtgaggatgaacggacttctgtgactcccgagaccttgaaacgggcttacgaggcccatctctactacagccagggcaaaacctcagcgatcgccaccctgcgtgatcactacatggcactggcctacatggtccgcgatcgcctcctgcaacggtggctagcttcactgtcgacctatcaacaacagcacgtcaaagtggtctgttacctgtccgctgagtttttgatgggtcggcacctcgaaaactgcctgatcaacctgcatcttcacgaccgcgttcagcaagttttggatgaactgggtctcgattttgagcaactgctagagaaagaggaagaacccgggctaggcaacggtggcctcggtcgcctcgcagcttgtttcctcgactccatggctaccctcgacattcctgccgtcggctatggcattcgctatgagttcggtatcttccaccaagaactccacaacggctggcagatcgaaatccccgataactggctgcgctttggcaacccttgggagctagagcggcgcgaacaggccgtggaaattaagttgggcggccacacggaggcctaccacgatgcgcgaggccgctactgcgtctcttggatccccgatcgcgtcattcgcgccatcccctacgacacccccgtaccgggctacgacaccaataacgtcagcatgttgcggctctggaaggctgagggcaccacggaactcaaccttgaggctttcaactcaggcaactacgacgatgcggttgccgacaaaatgtcgtcggaaacgatctcgaaggtgctctatcccaacgacaacaccccccaagggcgggaactgcggctggagcagcagtatttcttcgtctcggcttcgctccaagacatcatccgtcgccacttgatgaaccacggtcatcttgagcggctgcatgaggcgatcgcagtccagcttaacgacacccatcccagcgtggcggtgccggagttgatgcgcctcctgatcgatgagcatcacctgacttgggacaatgcttggacgattacacagcgcaccttcgcctacaccaaccacacgctgctacctgaagccttggaacgctggcccgtgggcatgttccagcgcactttaccgcgcttgatggagattatctacgaaatcaactggcgcttcttggccaatgtgcgggcctggtatcccggtgacgacacgagagctcgccgcctctccctgattgaggaaggagctgagccccaggtgcgcatggctcacctcgcctgcgtgggcagtcatgccatcaacggtgtggcagccctgcatacgcaactgctcaagcaagaaaccctgcgagatttctacgagctttggcccgagaaattcttcaacatgaccaacggtgtgacgccccgccgctggctgctgcaaagtaatcctcgcctagccaacctgatcagcgatcgcattggcaatgactggattcatgatctcaggcaactgcgacggctggaagacagcgtgaacgatcgcgagtttttacagcgctgggcagaggtcaagcaccaaaataaggtcgatctgagccgctacatctaccagcagactcgcatagaagtcgatccgcactctctctttgatgtgcaagtcaaacggattcacgaatacaaacgccagctcctcgctgtcatgcatatcgtgacgctctacaactggctgaagcacaatccccagctcaacctggtgccgcgcacttttatctttgcgggcaaagcggccccgggttactaccgtgccaagcaaatcgtcaaactgatcaatgcggtcgggagcatcatcaaccatgatcccgatgtccaagggcgactgaaggtcgtcttcctacctaacttcaacgtttccttggggcagcgcatttatccagctgccgatttgtcggagcaaatctcaactgcagggaaagaagcgtccggcaccggcaacatgaagttcaccatgaatggcgcgctgacaatcggaacctacgatggtgccaacatcgagatccgcgaggaagtcggccccgaaaacttcttcctgtttggcctgcgagccgaagatatcgcccgacgccaaagtcggggctatcgacctgtggagttctggagcagcaatgcggaactgcgggcagtcctcgatcgctttagcagtggtcacttcacaccggatcagcccaacctcttccaagacttggtcagcgatctgctgcagcgggatgagtacatgttgatggcggactatcagtcctacatcgactgccagcgcgaagctgctgctgcctaccgcgattccgatcgctggtggcggatgtcgctactcaacaccgcgagatcgggcaagttctcctccgatcgcacgatcgctgactacagcgaacagatctgggaggtcaaaccagtccccgtcagcctaagcactagcttttag

SEQ ID NO: 68 - protein, 844 aa, Synechococcus elongatus PCC 7942
MSDSTAQLSYDPTTSYLEPSGLVCEDERTSVTPETLKRAYEAHLYYSQGKTSAIATLRDHYMALAYMVRDRLLQRWLASLSTYQQQHVKVVCYLSAEFLMGRHLENCLINLHLHDRVQQVLDELGLDFEQLLEKEEEPGLGNGGLGRLAACFLDSMATLDIPAVGYGIRYEFGIFHQELHNGWQIEIPDNWLRFGNPWELERREQAVEIKLGGHTEAYHDARGRYCVSWIPDRVIRAIPYDTPVPGYDTNNVSMLRLWKAEGTTELNLEAFNSGNYDDAVADKMSSETISKVLYPNDNTPQGRELRLEQQYFFVSASLQDIIRRHLMNHGHLERLHEAIAVQLNDTHPSVAVPELMRLLIDEHHLTWDNAWTITQRTFAYTNHTLLPEALERWPVGMFQRTLPRLMEIIYEINWRFLANVRAWYPGDDTRARRLSLIEEGAEPQVRMAHLACVGSHAINGVAALHTQLLKQETLRDFYELWPEKFFNMTNGVTPRRWLLQSNPRLANLISDRIGNDWIHDLRQLRRLEDSVNDREFLQRWAEVKHQNKVDLSRYIYQQTRIEVDPHSLFDVQVKRIHEYKRQLLAVMHIVTLYNWLKHNPQLNLVPRTFIFAGKAAPGYYRAKQIVKLINAVGSIINHDPDVQGRLKVVFLPNFNVSLGQRIYPAADLSEQISTAGKEASGTGNMKFTMNGALTIGTYDGANIEIREEVGPENFFLFGLRAEDIARRQSRGYRPVEFWSSNAELRAVLDRFSSGHFTPDQPNLFQDLVSDLLQRDEYMLMADYQSYIDCQREAAAAYRDSDRWWRMSLLNTARSGKFSSDRTIADYSEQIWEVKPVPVSLSTSF

SEQ ID NO: 69 - DNA, 2085 bp, Synechococcus elongatus PCC 7942
atgactgtttcatcccgtcgccctgaatcgaccgtggctgttgaccccggccaaagctatcccctcggggcaaccgtctatcccaccggcgtcaacttctcgctctacaccaagtacgcgacgggcgttgaattactgctgtttgatgaccctgagggtgcccagcctcaacggacagtgcgcctcgatccgcacctcaatcgcacctctttctactggcatgtttttattccgggcattcgctccggtcaggtttatgcttaccgcgtctttggcccctacgcacctgatcgcggcctctgttttaaccccaacaaagtgctgctggatccctacgctcgcggggttgtcggctggcagcactacagtcgcgaagcggctattaaacccagtaataactgcgttcaagccctgcgtagcgtggttgttgaccccagcgactacgactgggaaggcgatcgccatccacgcacaccctacgctcgcacagtaatctatgagctgcatgttggcggcttcaccaagcatcccaattccggcgtcgcccctgaaaaacgtggcacctacgctggtctaatcgaaaaaattccctacctgcaatccctcggcgtcacggccgttgagttgctgccggtgcaccagttcgatcgccaagatgcccccttaggacgcgagaactactggggctacagcaccatggctttttttgcgccccacgcagcctacagctctcgccatgatccacttggtccagttgatgagttccgcgacctcgtcaaggcgctccaccaagcagggattgaggtgattctcgacgtggtgttcaaccacactgctgaagggaatgaagacggtccaacgctgtctttcaaaggtctagcgaattcaacctactatctgctggatgaacaggcgggctatcgcaactacaccggctgcggcaacaccgtcaaagctaacaattcgatcgtgcgatcgctgattctcgattgcctgcgttattgggtctcggaaatgcacgtcgatggcttccgctttgaccttgcgtcggtgctgagtcgtgatgccaatggcaaccccctatcggatccgcccttgctttgggcgattgattccgatccggttttggccggtacgaagctcattgctgaagcttgggacgcagccggcttatatcaggttggtacctttattggcgatcgctttgggacttggaacggtcccttccgggacgatattcggcgtttttggcgtggagatcagggctgtacttacgccctcagtcaacgcctgctgggtagccccgatgtctacagcacagaccaatggtatgccggacgcaccattaacttcatcacctgccatgacggctttacgctgcgagatctagtcagctatagccagaagcacaactttgccaatggagagaacaatcgggacgggaccaatgacaactacagctggaactacggcattgaaggcgagaccgatgaccccacgattctgagcttacgggaacggcagcagcgcaatttgctcgccacgttattcctcgcccagggcacaccgatgctgacgatgggcgatgaggtcaaacgcagtcagcagggtaacaataacgcctactgccaagacaatgagatcagctggtttgattggtcgctgtgcgatcgccatgccgatttcttggtgttcagtcgccgcctgattgaactttcccagtcgctggtgatgttccaacagaacgaactgctgcagaacgaaccccatccgcgtcgtccctatgccatctggcatggcgtcaaactcaaacaacccgattgggcgctgtggtcccacagtctggccgtcagtctctgccatcctcgccagcaggaatggctttacctagcctttaatgcttactgggaagacctgcgcttccagttgccgaggcctcctcgcggccgcgtttggtatcgcttgctcgatacttcactgccgaatcttgaagcttgtcatctgccggatgaggcaaaaccctgcctacggcgcgattacatcgtcccagcgcgatcgctcttactgttgatggctcgtgcttaa

SEQ ID NO: 70 - protein, 694 aa, Synechococcus elongatus PCC 7942
MTVSSRRPESTVAVDPGQSYPLGATVYPTGVNFSLYTKYATGVELLLFDDPEGAQPQRTVRLDPHLNRTSFYWHVFIPGIRSGQVYAYRVFGPYAPDRGLCFNPNKVLLDPYARGVVGWQHYSREAAIKPSNNCVQALRSVVVDPSDYDWEGDRHPRTPYARTVIYELHVGGFTKHPNSGVAPEKRGTYAGLIEKIPYLQSLGVTAVELLPVHQFDRQDAPLGRENYWGYSTMAFFAPHAAYSSRHDPLGPVDEFRDLVKALHQAGIEVILDVVFNHTAEGNEDGPTLSFKGLANSTYYLLDEQAGYRNYTGCGNTVKANNSIVRSLILDCLRYWVSEMHVDGFRFDLASVLSRDANGNPLSDPPLLWAIDSDPVLAGTKLIAEAWDAAGLYQVGTFIGDRFGTWNGPFRDDIRRFWRGDQGCTYALSQRLLGSPDVYSTDQWYAGRTINFITCHDGFTLRDLVSYSQKHNFANGENNRDGTNDNYSWNYGIEGETDDPTILSLRERQQRNLLATLFLAQGTPMLTMGDEVKRSQQGNNNAYCQDNEISWFDWSLCDRHADFLVFSRRLIELSQSLVMFQQNELLQNEPHPRRPYAIWHGVKLKQPDWALWSHSLAVSLCHPRQQEWLYLAFNAYWEDLRFQLPRPPRGRVWYRLLDTSLPNLEACHLPDEAKPCLRRDYIVPARSLLLLMARA

SEQ ID NO: 71 - DNA, 1500 bp, Synechococcus elongatus PCC 7942
gtgtttacacgagccgccggcattttgttacatcccacttcgttgccggggccattcggcagcggcgaccttggtccggcctcgcggcagtttcttgactggttggcaacggcgggacaacaactgtggcaagtgttgccccttgggccgacaggctatggctattcgccttacctctgctattccgccttggctggcaatcccgctctgatcagccctgaactcttggcagaagatggctggctccaagaatcggactgggcagactgtcctgcttttccgagcgatcgcgtcgattttgccagcgtcttgccctatcgcgatcaactgctgcgccgtgcctacagccaattcctgcaaagagcggcttccagcgatcgccaactctttcaagctttctgtgaacaggaagcccattggctggatgactacgccctgttcatggcgattaagctggctagccaaggtcagccttggacagaatggccggaagcgctgcgtcagcggcaacctcaagccttggctaaagcccgcgatcgctggggcggcgaaattggcttccagcagtttctgcagtggcaatttcgcgagcagtggttggccctgcgggaagaagcccaagcccgccatatttcgctgattggcgatattccgatctacgtcgctcatgacagtgcggacgtttgggccaatcctcagttctttgccctcgatcctgaaacgggcgcagttgatcagcaggccggtgtgccgcctgactatttctccgaaaccggccaactctggggcaatcccgtctacaactgggctgcgctgcaggcggatggctatcgctggtggttgcaacggctgcaacagctcctcagcttagtggactacattcgcatcgaccacttccgcggtttagaggcgttttggtcggttcccgctggtgaagaaacggcgatcgacggagagtgggtcaaagccccaggcgctgatctgctgagcacgattcgccaaaaactgggagcgctaccgattctggcagaggatctcggtgtgattacgccggaggtggaagcgctgcgcgatcgctttgagctgccgggcatgaagattctgcagttcgcctttgactctggggccggcaatgcctatctaccgcacaactactggggtcgtcgctgggtggcttacaccggcacccacgacaatgacacgaccgtcggctggttcctgtcccgcaatgacagcgatcgccaaacggtgctggattatctgggcgcagagtcgggctgggaaattgagtggaagctgatccgcttggcttggagctcgacggcagattgggcgatcgcaccgctccaagatgtcttcgggctggatagcagcgcccgcatgaatcgaccggggcaagccaccggcaactgggactggcgcttcagtgccgactggctgacgggcgatcgtgcccaacgcctgcggcgactctcgcagctctatggacgctgtagatga

SEQ ID NO: 72 - protein, 499 aa, Synechococcus elongatus PCC 7942
MFTRAAGILLHPTSLPGPFGSGDLGPASRQFLDWLATAGQQLWQVLPLGPTGYGYSPYLCYSALAGNPALISPELLAEDGWLQESDWADCPAFPSDRVDFASVLPYRDQLLRRAYSQFLQRAASSDRQLFQAFCEQEAHWLDDYALFMAIKLASQGQPWTEWPEALRQRQPQALAKARDRWGGEIGFQQFLQWQFREQWLALREEAQARHISLIGDIPIYVAHDSADVWANPQFFALDPETGAVDQQAGVPPDYFSETGQLWGNPVYNWAALQADGYRWWLQRLQQLLSLVDYIRIDHFRGLEAFWSVPAGEETAIDGEWVKAPGADLLSTIRQKLGALPILAEDLGVITPEVEALRDRFELPGMKILQFAFDSGAGNAYLPHNYWGRRWVAYTGTHDNDTTVGWFLSRNDSDRQTVLDYLGAESGWEIEWKLIRLAWSSTADWAIAPLQDVFGLDSSARMNRPGQATGNWDWRFSADWLTGDRAQRLRRLSQLYGRCR

SEQ ID NO: 73 - protein, 543 aa, Synechococcus elongatus PCC 7942
MNIHTVATQAFSDQKPGTSGLRKQVPVFQKRHYLENFVQSIFDSLEGYQGQTLVLGGDGRYYNRTAIQTILKMAAANGWGRVLVGQGGILSTPAVSNLIRQNGAFGGIILSASHNPGGPEGDFGIKYNISNGGPAPEKVTDAIYACSLKIEAYRILEAGDVDLDRLGSQQLGEMTVEVIDSVADYSRLMQSLFDFDRIRDRLRGGLRIAIDSMHAVTGPYATTIFEKELGAAAGTVFNGKPLEDFGGGHPDPNLVYAHDLVELLFGDRAPDFGAASDGDGDRNMILGNHFFVTPSDSLAILAANASLVPAYRNGLSGIARSMPTSAAADRVAQALNLPCYETPTGWKFFGNLLDADRVTLCGEESFGTGSNHVREKDGLWAVLFWLNILAVREQSVAEIVQEHWRTYGRNYYSRHDYEGVESDRASTLVDKLRSQLPSLTGQKLGAYTVAYADDFRYEDPVDGSISEQQGIRIGFEDGSRMVFRLSGTGTAGATLRLYLERFEGDTTKQGLDPQVALADLIAIADEVAQITTLTGFDQPTVIT

SEQ ID NO: 74 - protein, 567 aa, Synechocystis sp. PCC 6803
MSKPLIAALHFLQFLYMTSRINPLAGQHPPADSLLDVAKLLDDYYRQQPDPENPAQLVSFGTSGHRGSALNGTFNEAHILAVTQAVVDYRQAQGITGPLYMGMDSHALSEPAQKTALEVLAANQVETFLTTATDLTRFTPTPAVSYAILTHNQGRKEGLADGIIITPSHNPPTDGGFKYNPPSGGPAEPEATQWIQNRANELLKNGNKTVKRLDYEQALKATTTHAHDFVTPYVAGLADIIDLDVIRSAGLRLGVDPLGGANVGYWEPIAAKYNLNISLVNPGVDPTFKFMTLDWDGKIRMDCSSPYAMASLVKIKDHYDIAFGNDTDGDRHGIVTPSVGLMNPNHFLSVAIWYLFSQRQQWSGLSAIGKTLVSSSMIDRVGAMINRQVYEVPVGFKWFVSGLLDGSFGFGGEESAGASFLKKNGTVWTTDKDGTIMDLLAAEITAKTGKDPGLHYQDLTAKLGNPIYQRIDAPATPAQKDRLKKLSPDDVTATSLAGDAITAKLTKAPGNQAAIGGLKVTTAEGWFAARPSGTENVYKIYAESFKDEAHLQAIFTEAEAIVTSALG

SEQ ID NO: 75 - DNA, 1632 bp, Synechococcus elongatus PCC 7942; identical to SEQ ID NO: 24

SEQ ID NO: 76 - protein, 543 aa, Synechococcus elongatus PCC 7942; identical to SEQ ID NO: 73

SEQ ID NO: 77 - protein, 552 aa, Synechococcus sp. WH8102
MTTSAPAEPTLRLVRLDAPFTDQKPGTSGLRKSSQQFEQANYLESFVEAVFRTLPGVQGGTLVLGGDGRYGNRRAIDVILRMGAAHGLSKVIVTTGGILSTPAASNLIRQRQAIGGIILSASHNPGGPNGDFGVKVNGANGGPTPASFTDAVFECTKTLEQYTIVDAAAIAIDTPGSYSIGAMQVEVIDGVDDFVALMQQLFDFDRIRELIRSDFPLAFDAMHAVTGPYATRLLEEILGAPAGSVRNGVPLEDFGGGHPDPNLTYAHELAELLLDGEEFRFGAACDGDGDRNMILGQHCFVNPSDSLAVLTANATVAPAYADGLAGVARSMPTSSAVDVVAKELGIDCYETPTGWKFFGNLLDAGKITLCGEESFGTGSNHVREKDGLWAVLFWLQILAERRCSVAEIMAEHWKRFGRHYYSRHDYEAVASDAAHGLFHRLEGMLPGLVGQSFAGRSVSAADNFSYTDPVDGSVTKGQGLRILLEDGSRVMVRLSGTGTKGATIRVYLESYVPSSGDLNQDPQVALADMISAINELAEIKQRTGMDRPTVIT

SEQ ID NO: 78 - DNA, 1662 bp, Synechococcus sp. RCC 307
gtgacgctttcctcacccagcactgagttctccgtgcagcagatcaagctgccagaagcgtttcaagaccagaagcctggcacctcgggactgcgcaagagcacccaacaatttgaacagcctcattacctcgaaagttttatcgaggcgatcttccgcaccctccctggtgtgcaaggcgggaccttggtggtgggcggtgatggccgctacggcaaccgccgcgccatcgatgtcatcacccggatggcggcagcccatggactggggcggattgtgctgaccaccggcggcatcctctccacccctgccgcttccaacttgatccgccaacgccaggccattggcggcatcatcctctcggccagccacaaccctggagggcccaaaggcgactttggcgtcaaggtcaatggcgccaacggcggccctgcccctgaatctcttaccgatgccatctacgcctgcagccagcagctcgatggctaccgcatcgcaagtggaaccgcactgcccctcgacgccccagccgagcatcaaatcggtgcgttgaacgtggaggtgatcgacggcgtcgacgactacctgcaactgatgcagcacttgttcgacttcgatctgatcagcgatttgctcaagggctcatggccaatggcctttgacgccatgcatgccgtcactggtccctacgccagcaaactctttgagcagctcctaggagccccaagcgggaccgtgcgcaacgggcgctgcctcgaagactttggtggcggccatcccgatcccaacctcacctacgccaaagagctggcgacgctgctgctggatggtgatgactatcgctttggcgcggcctgtgatggcgatggcgaccgcaacatgattttggggcagcgctgctttgtgaaccccagcgacagcctcgctgtcttaacggcgaacgccaccttggtgaagggctatgcctccggcctggccggcgttgctcgctcgatgcccaccagtgccgcagtggatgtggtggccaagcagctggggatcaattgctttgagacccccaccggttggaaatttttcggcaacctgctcgatgccggacgcatcaccctttgcggggaagagagctttggaacaggcagtgatcacatccgcgaaaaagatggcctctgggctgtgttgttttggctctcgatcctggccaagcgccaatgctctgttgcggaggtgatgcagcagcactggagcacctacgggcgtcattactactcgcgccatgactacgaaggtgtcgaaaccgatcgggcccatgggctctacaacggcctgcgcgatcggcttggcgagctgactggaaccagctttgccgatagccgcatcgccaatgctgacgacttcgcctacagcgaccccgtcgatggctcactgacccagaagcaaggcctacgtctgctcctggaggacggcagccgcatcatcctgcggctctcgggaaccggcaccaaaggagccacgctgcggctctatctcgagcgctatgtcgccactggcggcaacctcgatcaaaatccccagcaagccttagccggcatgattgcggccgccgatgccctcgccggcatccggtcaaccaccggcatggatgtccccacggtgatcacctga

SEQ ID NO: 79 - protein, 553 aa, Synechococcus sp. RCC 307
MTLSSPSTEFSVQQIKLPEAFQDQKPGTSGLRKSTQQFEQPHYLESFIEAIFRTLPGVQGGTLVVGGDGRYGNRRAIDVITRMAAAHGLGRIVLTTGGILSTPAASNLIRQRQAIGGIILSASHNPGGPKGDFGVKVNGANGGPAPESLTDAIYACSQQLDGYRIASGTALPLDAPAEHQIGALNVEVIDGVDDYLQLMQHLFDFDLISDLLKGSWPMAFDAMHAVTGPYASKLFEQLLGAPSGTVRNGRCLEDFGGGHPDPNLTYAKELATLLLDGDDYRFGAACDGDGDRNMILGQRCFVNPSDSLAVLTANATLVKGYASGLAGVARSMPTSAAVDVVAKQLGINCFETPTGWKFFGNLLDAGRITLCGEESFGTGSDHIREKDGLWAVLFWLSILAKRQCSVAEVMQQHWSTYGRHYYSRHDYEGVETDRAHGLYNGLRDRLGELTGTSFADSRIANADDFAYSDPVDGSLTQKQGLRLLLEDGSRIILRLSGTGTKGATLRLYLERYVATGGNLDQNPQQALAGMIAAADALAGIRSTTGMDVPTVIT

SEQ ID NO: 80 - DNA, 1467 bp, Synechococcus sp PCC 7002
gtgttggcgtttgggaatcaacagccgattcggttcggcacagacggttggcgtggcattattgcggcggattttacctttgaacgggtgcaacgggtggcgatcgccacagcccatgttttaaaagaaaatttcgcaaaccaagccattgataacacgataatcgtcggctacgaccggcggtttctcgcagatgaatttgcccttgctgccgccgaagcgatccagggggaaggatttcacgtacttctagccaatagttttgcgccaaccccagccctgagctatgccgcccaccaccacaaggctctgggggcgatcgccttaacggccagccataatccagcgggttatttaggattaaaagtgaaaggggctttcggcggctcggtttccgaagaaattacggctcagattgaagcgcgactggaagccgggattgatcctcaacattcaacgacgggccgtttagattattttgatccctggcaggactattgcgccggattacagcaactggttgatttagaaaaaattcgccaggcgatcgccgctggtcgtctccaggtctttgccgatgtaatgtatggcgcagcggcgggcggtttgacccaactgctcaatgcggcgatccaagaaatccattgtgaaccagatcctttgttcggcggccgcccaccagagcctttagaaaaacatttgtctcaactgcaacgcaccattcgcgccgcccataatcaagatttagaggcaattcaggtgggatttgtctttgatggtgatggcgatcgcattgctgctgtggctggggatggtgagtttctcagttcccaaaagctaatcccgattttgctggcccatttgtcccaaaatcgccaatatcaaggggaagtggtaaaaactgtcagcggctctgatttaatcccccgtttgagcgaatactacggtttgccagtctttgaaacacccatcggctacaaatacattgccgaacgaatgcaacagacccaggtgcttcttggtggcgaagaatccggcggcattggctacggccaccacattcccgaacgggatgcgctgctggcggcattgtatctcctagaggcgatcgccatttttgatcaagacctcggcgagatttaccagagtcttcaaagcaaagctaatttttatggcgcctacgaccgcattgatttacatttgcgggatttctccagccgcgatcgcctattaaaaatcctcgcgacaaatccccccaaggcgatctccaaccatgacgtaattcacagcgaccccaaagatggctataaattccgccttgctgatcaaagttggttgctgattcgcttcagtggtaccgagcctgtactgcggttatatagtgaagcggtcaatcctaaagccgtacaagaaatcctcgcctgggcgcaaacctgggctgaggctgccgaccaagccgaaggttag

SEQ ID NO: 81 - protein, 488 aa, Synechococcus sp PCC 7002
MLAFGNQQPIRFGTDGWRGIIAADFTFERVQRVAIATAHVLKENFANQAIDNTIIVGYDRRFLADEFALAAAEAIQGEGFHVLLANSFAPTPALSYAAHHHKALGAIALTASHNPAGYLGLKVKGAFGGSVSEEITAQIEARLEAGIDPQHSTTGRLDYFDPWQDYCAGLQQLVDLEKIRQAIAAGRLQVFADVMYGAAAGGLTQLLNAAIQEIHCEPDPLFGGRPPEPLEKHLSQLQRTIRAAHNQDLEAIQVGFVFDGDGDRIAAVAGDGEFLSSQKLIPILLAHLSQNRQYQGEVVKTVSGSDLIPRLSEYYGLPVFETPIGYKYIAERMQQTQVLLGGEESGGIGYGHHIPERDALLAALYLLEAIAIFDQDLGEIYQSLQSKANFYGAYDRIDLHLRDFSSRDRLLKILATNPPKAISNHDVIHSDPKDGYKFRLADQSWLLIRFSGTEPVLRLYSEAVNPKAVQEILAWAQTWAEAADQAEG

SEQ ID NO: 82 - DNA, 1038 bp, Synechococcus elongatus PCC 7942
atgaccttgctattggccggggatatcggcggaaccaaaacgaatttaatgttggcgatcgcctctgattgcgatcgtttagaaccgctccatcaggccagttttgccagtgcggcctaccctgatttagtgccgatggtgcaggagtttttggctgccgcaccctccgccgaggtgcgatcgccagttgtggcttgttttggcattgccggccccgttgtccatggaaccgcgaagctgacgaacctgccttggcagctctctgaagcgcggctggcgaaggaattgggcattgcgcaggtggcgttgatcaatgattttgctgcgatcgcctacggcctacccggcttgaccgccgaagatcaagtcgttgtgcaagtcggtgaagccgatccggcggctccgatcgccattctgggggcaggaactggcttgggcgaaggcttcatcattcccacagcccaaggccgccaagtgtttggcagcgaaggttctcacgctgactttgcgccgcaaaccgaactggagtccgagttactgcattttctacgcaatttttacgcaatcgagcatatctcggtcgagcgagtggtctccggccaagggattgcagccatctacgccttcctgcgcgatcgccatcccgaccaagaaaatccagcccttggggcgattgcctcggcttggcaaacgggcggcgaccaagcccctgatctggcagcagccgtatcccaagcagccttgagcgatcgcgatccgctggccctacaagccatgcagatatttgtcagtgcttacggggcggaagccggcaacctcgcgttgaaattgctctcctacggcggggtctacgtcgccggcgggattgcgggcaaaatcctgccgctcttgactgatggcacttttctgcaagccttccaagccaagggacgggtgaaggggctgctgacgcggatgcctatcacgatcgtcacgaaccacgaagtcgggctgatcggggctggactgcgggcggctgcgatcgctactcaaccatga

SEQ ID NO: 83 - protein, 345 aa, Synechococcus elongatus PCC 7942
MTLLLAGDIGGTKTNLMLAIASDCDRLEPLHQASFASAAYPDLVPMVQEFLAAAPSAEVRSPVVACFGIAGPVVHGTAKLTNLPWQLSEARLAKELGIAQVALINDFAAIAYGLPGLTAEDQVVVQVGEADPAAPIAILGAGTGLGEGFIIPTAQGRQVFGSEGSHADFAPQTELESELLHFLRNFYAIEHISVERVVSGQGIAAIYAFLRDRHPDQENPALGAIASAWQTGGDQAPDLAAAVSQAALSDRDPLALQAMQIFVSAYGAEAGNLALKLLSYGGVYVAGGIAGKILPLLTDGTFLQAFQAKGRVKGLLTRMPITIVTNHEVGLIGAGLRAAAIATQP

SEQ ID NO: 84 - DNA, 1587 bp, Synechococcus elongatus PCC 7942
atgaccgcccagcagctctggcaacgctacctcgattggctctactacgatccctcgctggagttttacctcgacatcagccgcatgggattcgatgacgctttcgttactagcatgcagcccaagttccagcacgcctttgcggcgatggcagagctcgaggccggagcgatcgccaaccccgatgaacagcggatggtcggccactactggctgcgcgatcctgagctggcacccacaccggagctgcagacccaaattcgcgacacgctggccgcgatccaagacttcgccctcaaagtacacagtggcgtgttgcggccacccaccggctcccgcttcaccgacattctctcaattggcattggcgggtcggccctagggccgcagtttgtctcagaagccctccggcctcaagcggcactgctccagattcacttctttgacaacaccgatccagctggcttcgatcgcgttttagctgatctcggcgatcgccttgcttccaccttagtaatcgttatttccaaatctggcggcactcccgaaacccgcaacggcatgctggaggttcagtccgcctttgcccagcgagggattgcctttgcgccccaagctgtcgccgtcacaggggtggggagccatctcgatcatgtagcgatcacagaaagatggctggcccgtttccccatggaagactgggtgggcggccgcacctctgaactatctgcagtcggtctactctcggcagccctactgggcatcgacatcaccgccatgctggccggggcgcggcaaatggacgccctgacccgccattccgatttgcgacaaaatccggcagcgctcttggctttgagctggtactgggccggcaatgggcaaggcaaaaaagacatggtcatcctgccctacaaggacagcctgctgctgtttagccgctatctgcagcagttgatcatggagtcactgggcaaggagcgcgatctgctcggcaaggtagttcaccaaggcatcgccgtttacggcaacaaaggctcgaccgatcaacatgcctacgtccagcaactgcgcgagggcattcctaacttctttgccacgtttatcgaggtgctcgaagaccgacaggggccgtcgccagtcgtggagcctggcatcaccagtggcgactatctcagcgggctgcttcaaggcacccgcgcggcgctttacgaaaatgggcgtgagtcgatcacgattacggtgccgcgcgttgatgcacaacaggtgggggccttgatcgcgctgtatgaacgggcggtgggactctatgccagcttggttggcatcaatgcctatcaccagccgggggtggaagccggcaaaaaggctgctgccggtgttctcgagatccagcgccagattgtggagttgctccaacagggacaaccactctcgatcgcagcgatcgcagacgatttaggtcagagtgagcagattgaaacgatctacaaaatcctgcgccatctcgaagccaatcaacgcggcgttcagttaaccggcgatcgccataatcccctcagtctgattgcgagttggcaacgataa

SEQ ID NO: 85 - protein, 528 aa, Synechococcus elongatus PCC 7942
MTAQQLWQRYLDWLYYDPSLEFYLDISRMGFDDAFVTSMQPKFQHAFAAMAELEAGAIANPDEQRMVGHYWLRDPELAPTPELQTQIRDTLAAIQDFALKVHSGVLRPPTGSRFTDILSIGIGGSALGPQFVSEALRPQAALLQIHFFDNTDPAGFDRVLADLGDRLASTLVIVISKSGGTPETRNGMLEVQSAFAQRGIAFAPQAVAVTGVGSHLDHVAITERWLARFPMEDWVGGRTSELSAVGLLSAALLGIDITAMLAGARQMDALTRHSDLRQNPAALLALSWYWAGNGQGKKDMVILPYKDSLLLFSRYLQQLIMESLGKERDLLGKVVHQGIAVYGNKGSTDQHAYVQQLREGIPNFFATFIEVLEDRQGPSPVVEPGITSGDYLSGLLQGTRAALYENGRESITITVPRVDAQQVGALIALYERAVGLYASLVGINAYHQPGVEAGKKAAAGVLEIQRQIVELLQQGQPLSIAAIADDLGQSEQIETIYKILRHLEANQRGVQLTGDRHNPLSLIASWQR

SEQ ID NO: 86 - protein, 439 aa, Synechocystis sp. PCC 6803
MCCWQSRGLLVKRVLAIILGGGAGTRLYPLTKLRAKPAVPLAGKYRLIDIPVSNCINSEIVKIYVLTQFNSASLNRHISRAYNFSGFQEGFVEVLAAQQTKDNPDWFQGTADAVRQYLWLFREWDVDEYLILSGDHLYRMDYAQFVKRHRETNADITLSVVPVDDRKAPELGLMKIDAQGRITDFSEKPQGEALRAMQVDTSVLGLSAEKAKLNPYIASMGIYVFKKEVLHNLLEKYEGATDFGKEIIPDSASDHNLQAYLFDDYWEDIGTIEAFYEANLALTKQPSPDFSFYNEKAPIYTRGRYLPPTKMLNSTVTESMIGEGCMIKQCRIHHSVLGIRSRIESDCTIEDTLVMGNDFYESSSERDTLKARGEIAAGIGSGTTIRRAIIDKNARIGKNVMIVNKENVQEANREELGFYIRNGIVVVIKNVTIADGTVI

SEQ ID NO: 87 - protein, 429 aa, Nostoc sp. PCC 7120
MKKVLAIILGGGAGTRLYPLTKLRAKPAVPVAGKYRLIDIPVSNCINSEIFKIYVLTQFNSASLNRHIARTYNFSGFSEGFVEVLAAQQTPENPNWFQGTADAVRQYLWMLQEWDVDEFLILSGDHLYRMDYRLFIQRHRETNADITLSVIPIDDRRASDFGLMKIDNSGRVIDFSEKPKGEALTKMRVDTTVLGLTPEQAASQPYIASMGIYVFKKDVLIKLLKEALERTDFGKEIIPDAAKDHNVQAYLFDDYWEDIGTIEAFYNANLALTQQPMPPFSFYDEEAPIYTRARYLPPTKLLDCHVTESIIGEGCILKNCRIQHSVLGVRSRIETGCMIEESLLMGADFYQASVERQCSIDKGDIPVGIGPDTIIRRAIIDKNARIGHDVKIINKDNVQEADRESQGFYIRSGIVVVLKNAVITDGTII

SEQ ID NO: 88 - protein, 429 aa, Anabaena variabilis
MKKVLAIILGGGAGTRLYPLTKLRAKPAVPVAGKYRLIDIPVSNCINSEIFKIYVLTQFNSASLNRHIARTYNFSGFSEGFVEVLAAQQTPENPNWFQGTADAVRQYLWMLQEWDVDEFLILSGDHLYRMDYRLFIQRHRETNADITLSVIPIDDRRASDFGLMKIDNSGRVIDFSEKPKGEALTKMRVDTTVLGLTPEQAASQPYIASMGIYVFKKDVLIKLLKESLERTDFGKEIIPDASKDHNVQAYLFDDYWEDIGTIEAFYNANLALTQQPMPPFSFYDEEAPIYTRARYLPPTKLLDCHVTESIIGEGCILKNCRIQHSVLGVRSRIETGCVIEESLLMGADFYQASVERQCSIDKGDIPVGIGPDTIIRRAIIDKNARIGHDVKIINKDNVQEADRESQGFYIRSGIVVVLKNAVITDGTII

SEQ ID NO: 89 - protein, 428 aa, Trichodesmium erythraeum IMS 101
MKNVLSIILGGGAGTRLYPLTKLRAKPAVPLAGKYRLIDIPISNCINSEIQKIYVLTQFNSASLNRHITRTYNFSGFSDGFVEVLAAQQTKDNPEWFQGTADAVRKYIWLFKEWDIDYYLILSGDHLYRMDYRDFVQRHIDTKADITLSVLPIDEARASEFGVMKIDNSGRIVEFSEKPKGNALKAMAVDTSILGVSPEIATKQPYIASMGIYVFNKDAMIKLIEDSEDTDFGKEILPKSAQSYNLQAYPFQGYWEDIGTIKSFYEANLALTQQPQPPFSFYDEQAPIYTRSRYLPPSKLLDCEITESIVGEGCILKKCRIDHCVLGVRSRIEANCIIQDSLLMGSDFYESPTERRYGLKKGSVPLGIGAETKIRGAIIDKNARIGCNVQIINKDNVEEAQREEEGFIIRSGIVVVLKNATIPDGTVI

SEQ ID NO: 90 - protein, 430 aa, Synechococcus elongatus PCC 7942
MKNVLAIILGGGAGSRLYPLTKQRAKPAVPLAGKYRLIDIPVSNCINADINKIYVLTQFNSASLNRHLSQTYNLSSGFGNGFVEVLAAQITPENPNWFQGTADAVRQYLWLIKEWDVDEYLILSGDHLYRMDYSQFIQRHRDTNADITLSVLPIDEKRASDFGLMKLDGSGRVVEFSEKPKGDELRAMQVDTTILGLDPVAAAAQPFIASMGIYVFKRDVLIDLLSHHPEQTDFGKEVIPAAATRYNTQAFLFNDYWEDIGTIASFYEANLALTQQPSPPFSFYDEQAPIYTRARYLPPTKLLDCQVTQSIIGEGCILKQCTVQNSVLGIRSRIEADCVIQDALLMGADFYETSELRHQNRANGKVPMGIGSGSTIRRAIVDKNAHIGQNVQIVNKDHVEEADREDLGFMIRSGIVVVVKGAVIPDNTVI

SEQ ID NO: 91 - protein, 431 aa, Synechococcus sp. WH8102
MKRVLAIILGGGAGTRLYPLTKMRAKPAVPLAGKYRLIDIPISNCINSNINKMYVMTQFNSASLNRHLSQTFNLSASFGQGFVEVLAAQQTPDSPSWFEGTADAVRKYQWLFQEWDVDEYLILSGDQLYRMDYSLFVEHHRSTGADLTVAALPVDPKQAEAFGLMRTDGDGDIKEFREKPKGDSLLEMAVDTSRFGLSANSAKERPYLASMGIYVFSRDTLFDLLDSNPGYKDFGKEVIPEALKRGDKLKSYVFDDYWEDIGTIGAFYEANLALTQQPTPPFSFYDEKFPIYTRPRYLPPSKLVDAQITNSIVGEGSILKSCSIHHCVLGVRSRIETDVVLQDTLVMGADFFESSDERAVLRERGGIPVGVGQGTTVKRAILDKNARIGSNVTIVNKDHVEEADRSDQGFYIRNGIVVVVKNATIQDGTVI

SEQ ID NO: 92 - protein, 431 aa, Synechococcus sp. RCC 307
MKRVLAIILGGGAGTRLYPLTKMRAKPAVPLAGKYRLIDIPVSNCINSGINKIYVLTQFNSASLNRHIAQTFNLSSGFDQGFVEVLAAQQTPDSPSWFEGTADAVRKYEWLLQEWDIDEVLILSGDQLYRMDYAHFVAQHRASGADLTVAALPVDREQAQSFGLMHTGAEASITKFREKPKGEALDEMSCDTASMGLSAEEAHRRPFLASMGIYVFKRDVLFRLLAENPGATDFGKEIIPKALDDGFKLRSYLFDDYWEDIGTIRAFYEANLALTTQPRPPFSFYDKRFPIYTRHRYLPPSKLQDAQVTDSIVGEGSILKACSIHHCVLGVRSRIEDEVALQDTLVMGNDFYESGEERAILRERGGIPMGVGRGTTVKKAILDKNVRIGSNVSIINKDNVEEADRAEQGFYIRGGIVVITKNASIPDGMVI

SEQ ID NO: 93 - protein, 429 aa, Synechococcus sp. PCC 7002
MKRVLGIILGGGAGTRLYPLTKLRAKPAVPLAGKYRLIDIPVSNCINSEIHKIYILTQFNSASLNRHISRTYNFTGFTEGFTEVLAAQQTKENPDWFQGTADAVRQYSWLLEDWDVDEYIILSGDHLYRMDYREFIQRHRDTGADITLSVVPVGEKVAPAFGLMKIDANGRVVDFSEKPTGEALKAMQVDTQSLGLDPEQAKEKPYIASMGIYVFKKQVLLDLLKEGKDKTDFGKEIIPDAAKDYNVQAYLFDDYWADIGTIEAFYEANLGLTKQPIPPFSFYDEKAPIYTRARYLPPTKVLNADVTESMISEGCIIKNCRIHHSVLGIRTRVEADCTIEDTMIMGADYYQPYEKRQDCLRRGKPPIGIGEGTTIRRAIIDKNARIGKNVMIVNKENVEESNREELGYYIRSGITVVLKNAVIPDGTVI

SEQ ID NO: 94 - protein, 477 aa, Synechocystis sp. PCC 6803
MKILFVAAEVSPLAKVGGMGDVVGSLPKVLHQLGHDVRVFMPYYGFIGDKIDVPKEPVWKGEAMFQQFAVYQSYLPDTKIPLYLFGHPAFDSRRIYGGDDEAWRFTFFSNGAAEFAWNHWKPEIIHCHDWHTGMIPVWMHQSPDIATVFTIHNLAYQGPWRGLLETMTWCPWYMQGDNVMAAAIQFANRVTTVSPTYAQQIQTPAYGEKLEGLLSYLSGNLVGILNGIDTEIYNPAEDRFISNVFDADSLDKRVKNKIAIQEETGLEINRNAMVVGIVARLVEQKGIDLVIQILDRFMSYTDSQLIILGTGDRHYETQLWQMASRFPGRMAVQLLHNDALSRRVYAGADVFLMPSRFEPCGLSQLMAMRYGCIPIVRRTGGLVDTVSFYDPINEAGTGYCFDRYEPLDCFTAMVRAWEGFRFKADWQKLQQRAMRADFSWYRSAGEYIKVYKGVVGKPEELSPMEEEKIAELTASYR

SEQ ID NO: 95 - protein, 472 aa, Nostoc sp. PCC 7120
MRILFVAAEAAPIAKVGGMGDVVGALPKVLRKMGHDVRIFLPYYGFLPDKMEIPKDPIWKGYAMFQDFTVHEAVLPGTDVPLYLFGHPAFTPRRIYSGDDEDWRFTLFSNGAAEFCWNYWKPDIIHCHDWHTGMIPVWMNQSPDITTVFTIHNLAYQGPWRWYLDKITWCPWYMQGHNTMAAAVQFADRVNTVSPTYAEQIKTPAYGEKIEGLLSFISGKLSGIVNGIDTEVYDPANDKYIAQTFTADTLDKRKANKIALQEEVGLEVNSNAFLIGMVTRLVEQKGLDLVIQMLDRFMAYTDAQFVLLGTGDRYYETQMWQLASRYPGRMATYLLYNDALSRRIYAGTDAFLMPSRFEPCGISQMMALRYGSIPIVRRTGGLVDTVSHHDPINEAGTGYCFDRYEPLDLFTCMIRAWEGFRYKPQWQELQKRGMSQDFSWYKSAKEYDKLYRSMYGLPDPEETQPELILTNQ

SEQ ID NO: 96 - protein, 472 aa, Anabaena variabilis
MRILFVAAEAAPIAKVGGMGDVVGALPKVLRKMGHDVRIFLPYYGFLPDKMEIPKDPIWKGYAMFQDFTVHEAVLPGTDVPLYLFGHPAFNPRRIYSGDDEDWRFTLFSNGAAEFCWNYWKPEIIHCHDWHTGMIPVWMNQSPDITTVFTIHNLAYQGPWRWYLDKITWCPWYMQGHNTMAAAVQFADRVNTVSPTYAEQIKTPAYGEKIEGLLSFISGKLSGIVNGIDTEVYDPANDKFIAQTFTADTLDKRKANKIALQEEVGLEVNSNAFLIGMVTRLVEQKGLDLVIQMLDRFMAYTDAQFVLLGTGDRYYETQMWQLASRYPGRMATYLLYNDALSRRIYAGSDAFLMPSRFEPCGISQMMALRYGSIPIVRRTGGLVDTVSHHDPVNEAGTGYCFDRYEPLDLFTCMIRAWEGFRYKPQWQELQKRGMSQDFSWYKSAKEYDRLYRSIYGLPEAEETQPELILANQ

SEQ ID NO: 97 - protein, 460 aa, Trichodesmium erythraeum IMS 101
MRILFVSAEATPLAKVGGMADVVGALPKVLRKMGHDVRIFMPYYGFLGDKMEVPEEPIWEGTAMYQNFKIYETVLPKSDVPLYLFGHPAFWPRHIYYGDDEDWRFTLFANGAAEFCWNGWKPEIVHCNDWHTGMIPVWMHETPDIKTVFTIHNLAYQGPWRWYLERITWCPWYMEGHNTMAAAVQFADRVTTVSPTYASQIQTPAYGENLDGLMSFITGKLHGILNGIDMNFYNPANDRYIPQTYDVNTLEKRVDNKIALQEEVGFEVNKNSFLMGMVSRLVEQKGLDLMLQVLDRFMAYTDTQFILLGTGDRFYETQMWQIASRYPGRMSVQLLHNDALSRRIYAGTDAFLMPSRFEPCGISQLLAMRYGSIPIVRRTGGLVDTVSFYDPINNVGTGYSFDRYEPLDLLTAMVRAYEGFRFKDQWQELQKRGMRENFSWDKSAQGYIKMYKSMLGLPEE

SEQ ID NO: 98 - protein, 465 aa, Synechococcus elongatus PCC 7942
MRILFVAAECAPFAKVGGMGDVVGSLPKVLKALGHDVRIFMPYYGFLNSKLDIPAEPIWWGYAMFNHFAVYETQLPGSDVPLYLMGHPAFDPHRIYSGEDEDWRFTFFANGAAEFSWNYWKPQVIHCHDWHTGMIPVWMHQSPDISTVFTIHNLAYQGPWRWKLEKITWCPWYMQGDSTMAAALLYADRVNTVSPTYAQQIQTPTYGEKLEGLLSFISGKLSGILNGIDVDSYNPATDTRIVANYDRDTLDKRLNNKLALQKEMGLEVNPDRFLIGFVARLVEQKGIDLLLQILDRFLSYSDAQFVVLGTGERYYETQLWELATRYPGRMSTYLMYDEGLSRRIYAGSDAFLVPSRFEPCGITQMLALRYGSVPIVRRTGGLVDTVFHHDPRHAEGNGYCFDRYEPLDLYTCLVRAWESYQYQPQWQKLQQRGMAVDLSWKQSAIAYEQLYAEAIGLPIDVLQEA

SEQ ID NO: 99 - protein, 513 aa, Synechococcus sp. WH8102
MRILFAAAECAPMIKVGGMGDVVGSLPPALAKLGHDVRLIMPGYSKLWTKLTISDEPIWRAQTMGTEFAVYETKHPGNGMTIYLVGHPVFDPERIYGGEDEDWRFTFFASAAAEFAWNVWKPNVLHCHDWHTGMIPVWMHQDPEISTVFTIHNLKYQGPWRWKLDRITWCPWYMQGDHTMAAALLYADRVNAVSPTYAEEIRTAEYGEKLDGLLNFVSGKLRGILNGIDLEAWNPQTDGALPATFSADDLSGKAVCKRVLQERMGLEVRDDAFVLGMVSRLVDQKGVDLLLQVADRLLAYTDTQIVVLGTGDRGLESGLWQLASRHAGRCAVFLTYDDDLSRLIYAGSDAFLMPSRFEPCGISQLYAMRYGSVPVVRKVGGLVDTVPPHSPADASGTGFCFDRFEPVDFYTALVRAWEAYRHRDSWQELQKRGMQQDYSWDRSAIDYDVMYRDVCGLKEPTPDAAMVEQFSQGQAADPSRPEDDAINAAPEAVTAPSGPSRNPLNRLFGRRAD

SEQ ID NO: 100 - protein, 507 aa, Synechococcus sp RCC 307
MRILFAAAECAPMVKVGGMGDVVGSLPPALAELGHDVRVIMPGYGKLWSQLDVPSEPIWRAQTMGTDFAVYETRHPKTGLTIYLVGHPVFDGERIYGGEDEDWRFTFFASATSEFAWNAWKPQVLHCHDWHTGMIPVWMHQDPEISTVFTIHNLKYQGPWRWKLERMTWCPWYMQGDHTMAAALLYADRVNAVSPTYAQEIRTPEYGEQLEGLLNYISGKLRGILNGIDVEAWNPATDSRIPATYSTADLSGKAVCKRALQERMGLQVNPDTFVIGLVSRLVDQKGVDLLLQVAERFLAYTDTQIVVLGTGDRHLESGLWQMASQHSGRFASFLTYDDDLSRLIYAGSDAFLMPSRFEPCGISQLLSMRYGTIPVVRRVGGLVDTVPPYVPATQEGNGFCFDRYEAIDLYTALVRAWEAYRHQDSWQQLMKRVMQVDFSWARSALEYDRMYRDVCGMKEPTPEADAVAAFSIPQPPEQQAARAAAEAADPNPQRRFNPLGLLRRNGG

SEQ ID NO: 101 - protein, 478 aa, Synechococcus sp. PCC 7002
MRILFVSAEAAPIAKAGGMGDVVGSLPKVLRQLGHDARIFLPYYGFLNDKLDIPAEPVWWGSAMFNTFAVYETVLPNTDVPLYLFGHPAFDGRHIYGGQDEFWRFTFFANGAAEFMWNHWKPQIAHCHDWHTGMIPVWMHQSPDISTVFTIHNLAYQGPWRGFLERNTWCPWYMDGDNVMASALMFADQVNTVSPTYAQQIQTKVYGEKLEGLLSWISGKSRGIVNGIDVELYNPSNDQALVKQFSTTNLEDRAANKVIIQEETGLEVNSKAFLMAMVTRLVEQKGIDLLLNILEQFMAYTDAQLIILGTGDRHYETQLWQTAYRFKGRMSVQLLYNDALSRRIYAGSDVFLMPSRFEPCGISQMMAMRYGSVPIVRRTGGLVDTVSFHDPIHQTGTGFSFDRYEPLDMYTCMVRAWESFRYKKDWAELQRRGMSHDFSWYKSAGEYLKMYRQSIKEAPELTTDEAEKITYLVKKHAI

SEQ ID NO: 102 - DNA, 1380 bp, Synechococcus elongatus PCC 7942
atgactgctgtcgttctccctgctgccgctgaaacgctggctgctttacaagcaacctttgatcggggggatacacgcacgctcgccttccgactggcgcgattacaggatctggccaagctagttgctgacaatgaagcggagctattgcaagccttggcgtcagacctccgcaaaccagcactggaagcctacgccagtgagatttatttcgtgcgcgaccaaatcaaactgacctgcaagcatctgcggcgctggatgcaacccgagaagcagtcgatttccttgatgcagcagcctggccaggcctatcgccaagcagaaccgctcggagtcgtgctgatcattggcccctggaactatccctttcagctgctcatcacgccgttgattggggcgatcgcggcgggaaattgtgccgtactcaaaccatcggaactggctcccgcgacttccagcctgattcagcgactgatcagcgatcgctttgaccctgattacatccgcgttttagaaggcgatgctagcgttagccaagccctgattactcagcccttcgatcacatcttcttcactggcggcacggcgatcgggcgaaaagtgatggctgctgcggccgaaaacctgacgcccgtcaccctcgagttgggcggtaagtcaccctgcattgttgataccgatatcgacctcgatgtggccgcccgtcgcatcgcctggggcaaattcttcaacgccggtcaaacctgcattgcgcctgactatttgttggtgcaacgcacggtcgcagagccgttcattgaagcgctgatcgacaacatccagcagttctatggcgaggatccgcaacagagtgctgactacgcccgcattgtcagcgatcgccactggcaaaggctaaatagcctgttggttgatggcacgattcgccatggtggtcaggtggataggagcgatcgctacatcgcaccgactttaattacggacgtcaactggcgcgatcccatcctgcaagaggagatttttgggcccctcttgccgattttgatttacgaccaattggatgaggcgatcgcccaaattcgtgcccagcccaagcccctcgcgctctatctattcagccgcgatcgccaagtgcaagagcgcgtcctagcggaaaccagcgccggtagcgtctgcctcaacgacacgatcctgcaggtcggcgtccccgatgctgcttttggtggggtcggccccagcggcatgggcggctatcacggcaaagccagtttcgaaaccttcagtcactacaagctggtgctcaagcgaccgttttggctcgatctggccctgcgctatccgccctacggcgacaagatcaacctcttccgcaagctctag

SEQ ID NO: 103 - protein, 459 aa, Synechococcus elongatus PCC 7942
MTAVVLPAAAETLAALQATFDRGDTRTLAFRLARLQDLAKLVADNEAELLQALASDLRKPALEAYASEIYFVRDQIKLTCKHLRRWMQPEKQSISLMQQPGQAYRQAEPLGVVLIIGPWNYPFQLLITPLIGAIAAGNCAVLKPSELAPATSSLIQRLISDRFDPDYIRVLEGDASVSQALITQPFDHIFFTGGTAIGRKVMAAAAENLTPVTLELGGKSPCIVDTDIDLDVAARRIAWGKFFNAGQTCIAPDYLLVQRTVAEPFIEALIDNIQQFYGEDPQQSADYARIVSDRHWQRLNSLLVDGTIRHGGQVDRSDRYIAPTLITDVNWRDPILQEEIFGPLLPILIYDQLDEAIAQIRAQPKPLALYLFSRDRQVQERVLAETSAGSVCLNDTILQVGVPDAAFGGVGPSGMGGYHGKASFETFSHYKLVLKRPFWLDLALRYPPYGDKINLFRKL

SEQ ID NO: 104 - DNA, 1011 bp, Synechycystis sp. PCC6083
atgattaaagcctacgctgccctggaagccaacggaaaactccaaccctttgaatacgaccccggtgccctgggtgctaatgaggtggagattgaggtgcagtattgtggggtgtgccacagtgatttgtccatgattaataacgaatggggcatttccaattaccccctagtgccgggtcatgaggtggtgggtactgtggccgccatgggcgaaggggtgaaccatgttgaggtgggggatttagtggggctgggttggcattcgggctactgcatgacctgccatagttgtttatctggctaccacaacctttgtgccacggcggaatcgaccattgtgggccactacggtggctttggcgatcgggttcgggccaagggagtcagcgtggtgaaattacctaaaggcattgacctagccagtgccgggccccttttctgtggaggaattaccgttttcagtcctatggtggaactgagtttaaagcccactgcaaaagtggcagtgatcggcattgggggcttgggccatttagcggtgcaatttctccgggcctggggctgtgaagtgactgcctttacctccagtgccaggaagcaaacggaagtgttggaattgggcgctcaccacatactagattccaccaatccagaggcgatcgccagtgcggaaggcaaatttgactatattatctccactgtgaacctgaagcttgactggaacttatacatcagcaccctggcgccccagggacatttccactttgttggggtggtgttggagcctttggatctaaatctttttccccttttgatgggacaacgctccgtttctgcctccccagtgggtagtcccgccaccattgccaccatgttggactttgctgtgcgccatgacattaaacccgtggtggaacaatttagctttgatcagatcaacgaggcgatcgcccatctagaaagcggcaaagcccattatcgggtagtgctcagccatagtaaaaattag

SEQ ID NO: 105 - protein, 336 aa, Synechycystis sp. PCC6083
MIKAYAALEANGKLQPFEYDPGALGANEVEIEVQYCGVCHSDLSMINNEWGISNYPLVPGHEVVGTVAAMGEGVNHVEVGDLVGLGWHSGYCMTCHSCLSGYHNLCATAESTIVGHYGGFGDRVRAKGVSVVKLPKGIDLASAGPLFCGGITVFSPMVELSLKPTAKVAVIGIGGLGHLAVQFLRAWGCEVTAFTSSARKQTEVLELGAHHILDSTNPEAIASAEGKFDYIISTVNLKLDWNLYISTLAPQGHFHFVGVVLEPLDLNLFPLLMGQRSVSASPVGSPATIATMLDFAVRHDIKPVVEQFSFDQINEAIAHLESGKAHYRVVLSHSKN

SEQ ID NO: 106 - DNA, 1023 bp, Acinetobacter baylyi
atgacaactaatgtgattcatgcttatgctgcaatgcaggcaggtgaagcactcgtgccttattcgtttgatgcaggcgaactgcaaccacatcaggttgaagttaaagtcgaatattgtgggctgtgccattccgatgtctcggtactcaacaacgaatggcattcttcggtttatccagtcgtggcaggtcatgaagtgattggtacgattacccaactgggaagtgaagccaaaggactaaaaattggtcaacgtgttggtattggctggacggcagaaagctgtcaggcctgtgaccaatgcatcagtggtcagcaggtattgtgcacgggcgaaaataccgcaactattattggtcatgctggtggctttgcagataaggttcgtgcaggctggcaatgggtcattcccctgcccgacgaactcgatccgaccagtgctggtcctttgctgtgtggcggaatcacagtatttgatccaattttaaaacatcagattcaggctattcatcatgttgctgtgattggtatcggtggtttgggacatatggccatcaagctacttaaagcatggggctgtgaaattactgcgtttagttcaaatccaaacaaaaccgatgagctcaaagccatgggggccgatcacgtggtcaatagccgtgatgatgccgaaattaaatcgcaacagggtaaatttgatttactgctgagtacagttaatgtgcctttaaactggaatgcgtatctaaacacactggcacccaatggcactttccattttttgggcgtggtgatggaaccaatccctgtacctgtcggtgcgctgctaggaggtgccaaatcgctaacagcatcaccaactggctcgcctgctgccttacgtaagctgctcgaatttgcggcacgtaagaatatcgcacctcaaatcgagatgtatcctatgtcggagctgaatgaggccatcgaacgcttacattcgggtcaagcacgttatcggattgtacttaaagccgatttttaa

SEQ ID NO: 107 - protein, 340 aa, Acinetobacter baylyi
MTTNVIHAYAAMQAGEALVPYSFDAGELQPHQVEVKVEYCGLCHSDVSVLNNEWHSSVYPVVAGHEVIGTITQLGSEAKGLKIGQRVGIGWTAESCQACDQCISGQQVLCTGENTATIIGHAGGFADKVRAGWQWVIPLPDELDPTSAGPLLCGGITVFDPILKHQIQAIHHVAVIGIGGLGHMAIKLLKAWGCEITAFSSNPNKTDELKAMGADHVVNSRDDAEIKSQQGKFDLLLSTVNVPLNWNAYLNTLAPNGTFHFLGVVMEPIPVPVGALLGGAKSLTASPTGSPAALRKLLEFAARKNIAPQIEMYPMSELNEAIERLHSGQARYRIVLKADF

SEQ ID NO: 108 - protein, 415 aa, Cuphea hookeriana
MVAAAASSAFFPVPAPGASPKPGKFGNWPSSLSPSFKPKSIPNGGFQVKANDSAHPKANGSAVSLKSGSLNTQEDTSSSPPPRTFLHQLPDWSRLLTAITTVFVKSKRPDMHDRKSKRPDMLVDSFGLESTVQDGLVFRQSFSIRSYEIGTDRTASIETLMNHLQETSLNHCKSTGILLDGFGRTLEMCKRDLIWVVIKMQIKVNRYPAWGDTVEINTRFSRLGKIGMGRDWLISDCNTGEILVRATSAYAMMNQKTRRLSKLPYEVHQEIVPLFVDSPVIEDSDLKVHKFKVKTGDSIQKGLTPGWNDLDVNQHVSNVKYIGWILESMPTEVLETQELCSLALEYRRECGRDSVLESVTAMDPSKVGVRSQYQHLLRLEDGTAIVNGATEWRPKNAGANGAISTGKTSNGNSVS

SEQ ID NO: 109 - protein, 328 aa, Cuphea hookeriana [sequence omitted]

SEQ ID NO: 110 - protein, 382 aa, Umbellularia californica
MATTSLASAFCSMKAVMLARDGRGMKPRSSDLQLRAGNAPTSLKMINGTKFSYTESLKRLPDWSMLFAVITTIFSAAEKQWTNLEWKPKPKLPQLLDDHFGLHGLVFRRTFAIRSYEVGPDRSTSILAVMNHMQEATLNHAKSVGILGDGFGTTLEMSKRDLMWVVRRTHVAVERYPTWGDTVEVECWIGASGNNGMRRDFLVRDCKTGEILTRCTSLSVLMNTRTRRLSTIPDEVRGEIGPAFIDNVAVKDDEIKKLQKLNDSTADYIQGGLTPRWNDLDVNQHVNNLKYVAWVFETVPDSIFESHHISSFTLEYRRECTRDSVLRSLTTVSGGSSEAGLVCDHLLQLEGGSEVLRARTEWRPKLTDSFRGISVIPAEPRV

SEQ ID NO: 111 - protein, 324 aa, Umbellularia californica
MLPDWSMLFAVITTIFSAAEKQWTNLEWKPKPKLPQLLDDHFGLHGLVFRRTFAIRSYEVGPDRSTSILAVMNHMQEATLNHAKSVGILGDGFGTTLEMSKRDLMWVVRRTHVAVERYPTWGDTVEVECWIGASGNNGMRRDFLVRDCKTGEILTRCTSLSVLMNTRTRRLSTIPDEVRGEIGPAFIDNVAVKDDEIKKLQKLNDSTADYIQGGLTPRWNDLDVNQHVNNLKYVAWVFETVPDSIFESHHISSFTLEYRRECTRDSVLRSLTTVSGGSSEAGLVCDHLLQLEGGSEVLRARTEWRPKLTDSFRGISVIPAEPRV

SEQ ID NO: 112 - protein, 382 aa, Cinnamomum camphora
MATTSLASAFCSMKAVMLARDGRGMKPRSSDLQLRAGNAQTSLKMINGTKFSYTESLKKLPDWSMLFAVITTIFSAAEKQWTNLEWKPKPNPPQLLDDHFGPHGLVFRRTFAIRSYEVGPDRSTSIVAVMNHLQEAALNHAKSVGILGDGFGTTLEMSKRDLIWVVKRTHVAVERYPAWGDTVEVECWVGASGNNGRRHDFLVRDCKTGEILTRCTSLSVMMNTRTRRLSKIPEEVRGEIGPAFIDNVAVKDEEIKKPQKLNDSTADYIQGGLTPRWNDLDINQHVNNIKYVDWILETVPDSIFESHHISSFTIEYRRECTMDSVLQSLTTVSGGSSEAGLVCEHLLQLEGGSEVLRAKTEWRPKLTDSFRGISVIPAESSV

SEQ ID NO: 113 - protein, 324 aa, Cinnamomum camphora
MLPDWSMLFAVITTIFSAAEKQWTNLEWKPKPNPPQLLDDHFGPHGLVFRRTFAIRSYEVGPDRSTSIVAVMNHLQEAALNHAKSVGILGDGFGTTLEMSKRDLIWVVKRTHVAVERYPAWGDTVEVECWVGASGNNGRRHDFLVRDCKTGEILTRCTSLSVMMNTRTRRLSKIPEEVRGEIGPAFIDNVAVKDEEIKKPQKLNDSTADYIQGGLTPRWNDLDINQHVNNIKYVDWILETVPDSIFESHHISSFTIEYRRECTMDSVLQSLTTVSGGSSEAGLVCEHLLQLEGGSEVLRAKTEWRPKLTDSFRGISVIPAESSV

SEQ ID NO: 114 - protein, 415 aa, Cuphea hookeriana
MVATAASSAFFPLPSADTSSRPGKLGNKPSSLSPLKPKSTPNGGLQVKANASAPPKINGSPVGLKSGGLKTQEDAHSAPPPRTFINQLPDWSMLLAAITTVFLAAEKQWMMLDWKPKRPDMLVDPFGLGSIVQDGLVFRQNFSIRSYEIGADRTASIETVMNHLQETALNHVKIAGLSNDGFGRTPEMYKRDLIWVVAKMQVMVNRYPTWGDTVEVNTWVAKSGKNGMRRDWLISDCNTGEILTRASSVWVMMNQKTRRLSKIPDEVRNEIEPHFVDSPPVIEDDDRKLPKLDEKTADSIRKGLTPRWNDLDVNQHVNNVKYIGWILESTPPEVLETQELCSLTLEYRRECGRESVLESLTAMDPSGGGYGSQFQHLLRLEDGGEIVKGRTEWRPKNGVINGVVPTGESSPGDYS

SEQ ID NO: 115 - protein, 329 aa, Cuphea hookeriana
MLPDWSMLLAAITTVFLAAEKQWMMLDWKPKRPDMLVDPFGLGSIVQDGLVFRQNFSIRSYEIGADRTASIETVMNHLQETALNHVKIAGLSNDGFGRTPEMYKRDLIWVVAKMQVMVNRYPTWGDTVEVNTWVAKSGKNGMRRDWLISDCNTGEILTRASSVWVMMNQKTRRLSKIPDEVRNEIEPHFVDSPPVIEDDDRKLPKLDEKTADSIRKGLTPRWNDLDVNQHVNNVKYIGWILESTPPEVLETQELCSLTLEYRRECGRESVLESLTAMDPSGGGYGSQFQHLLRLEDGGEIVKGRTEWRPKNGVINGVVPTGESSPGDYS

SEQ ID NO: 116 - protein, 9 aa, Artificial Sequence
  Domain 1 lipid phosphatase catalytic motif
  VARIANT (2)..(2): Xaa = Any Amino Acid
  VARIANT (3)..(3): Xaa = Any Amino Acid
  VARIANT (4)..(4): Xaa = Any Amino Acid
  VARIANT (5)..(5): Xaa = Any Amino Acid
  VARIANT (6)..(6): Xaa = Any Amino Acid
  VARIANT (7)..(7): Xaa = Any Amino Acid
KXXXXXXRP

SEQ ID NO: 117 - protein, 4 aa, Artificial Sequence
  Domain 2 lipid phosphatase catalytic motif
PSGH

SEQ ID NO: 118 - protein, 12 aa, Artificial Sequence
  Domain 3 lipid phosphatase catalytic motif
  VARIANT (3)..(3): Xaa = Any Amino Acid
  VARIANT (4)..(4): Xaa = Any Amino Acid
  VARIANT (5)..(5): Xaa = Any Amino Acid
  VARIANT (6)..(6): Xaa = Any Amino Acid
  VARIANT (7)..(7): Xaa = Any Amino Acid
  VARIANT (9)..(9): Xaa = Any Amino Acid
  VARIANT (10)..(10): Xaa = Any Amino Acid
  VARIANT (11)..(11): Xaa = Any Amino Acid
SRXXXXXHXXXD

SEQ ID NO: 119 - DNA, 1250 bp, Rhodococcus sp.
atgacccgaggcttcgttctccggcaggccgtcggcgccgcactcgccgccaacgccctgcgtcccctgcccggtgcgcccacgtcggtggtcgcgttcttctcagggtggctcaccaccgaactcgcaccgcacctgctcgccgtgaccgccgccgacgccgcccagcacgccgcgcgtcacggaacgcgaacccgaagcgaccgtgtcggcctcgcgctggccgccgcatccgccgccgggctcgccgccgtgatcgccaccggtcgtggcgccggagcggaagccgaatccgcgctcgtcgagacgctcggcgagaactacaccgaccgcgacagcgccatcgaacacccggggcggcccgtgtggcggcaactcctcaacccgttctggatgcggaacaaagcggtcacccgggtccgcaacctcgcgtacgggccgggcgggcgccgggcccgcctcgacatctaccaccggcaggatctgccgtcgaagagcccggtcctcctgcagatccacggcggcggatgggtgatcgggaacaaggatcaacagggtctgccgctcatgctcgagatggcctcgcgggggtgggtgtgcgcggccgtcaactacccgctgtcgccgaaggcgaagtggcccgaacacctgatcgcaatcaagcaggcgctggcctggctccgggagcacgtcgaggagtacggcggcaaccccgacttcatcgccgtcacaggtggttccgcgggtggccacctcgccgccatggtgggactcaccgcgaacgacagtcacctgcagccggggttcgaggacgtcgacacgtccgttcaggcgtgtgtcccgtactacggtgtctacgacatcgccggcgacaccggaatcaaggcggtcctccagcgcgtgcactccggactgatgccgatggtgctcggcaagcacgccacgttccccgacgactaccgggccgcgtccccgctcgcgcacctgcgggcggacgcaccgccgttcttcgtgattcacggcacgagcgattcgctgatccccgtcgccgaggcgcggatcttcgtcgacgagctccggcaggtgtccgacaaccccgtcgtctacgccgaattgaagggcgcgcagcacgcgttcgacgtgttcccctcgatccgcagcatctccgtcacgcaggcggtcgggcgcttcctggaatggtcgcgcagcgccaccaccgacgtgcccgcggcgggcacggaatcggcctg

SEQ ID NO: 120 - protein, 416 aa, Rhodococcus sp.
MTRGFVLRQAVGAALAANALRPLPGAPTSVVAFFSGWLTTELAPHLLAVTAADAAQHAARHGTRTRSDRVGLALAAASAAGLAAVIATGRGAGAEAESALVETLGENYTDRDSAIEHPGRPVWRQLLNPFWMRNKAVTRVRNLAYGPGGRRARLDIYHRQDLPSKSPVLLQIHGGGWVIGNKDQQGLPLMLEMASRGWVCAAVNYPLSPKAKWPEHLIAIKQALAWLREHVEEYGGNPDFIAVTGGSAGGHLAAMVGLTANDSHLQPGFEDVDTSVQACVPYYGVYDIAGDTGIKAVLQRVHSGLMPMVLGKHATFPDDYRAASPLAHLRADAPPFFVIHGTSDSLIPVAEARIFVDELRQVSDNPVVYAELKGAQHAFDVFPSIRSISVTQAVGRFLEWSRSATTDVPAAGTESA

SEQ ID NO: 121 - protein, 183 aa, Escherichia coli
MADTLLILGDSLSAGYRMSASAAWPALLNDKWQSKTSVVNASISGDTSQQGLARLPALLKQHQPRWVLVELGGNDGLRGFQPQQTEQTLRQILQDVKAANAEPLLMQIRLPANYGRRYNEAFSAIYPKLAKEFDVPLLPFFMEEVYLKPQWMQDDGIHPNRDAQPFIADWMAKQLQPLVNHDS

SEQ ID NO: 122 - DNA, 987 bp, Artificial Sequence
  Codon optimized polynucleotide encoding mature form of C8/C10FatB
atgctgccagattggagccgactcttgaccgccatcaccacagtctttgttaagtctaaacggcccgacatgcacgatcgaaaaagcaagcgccccgatatgctggtggacagctttggcttggaatctaccgtgcaggatgggttggtctttcgacagagtttctcgattcgcagttatgaaattggcactgatcgtacggcaagcattgagactctgatgaaccacttgcaagagacaagcttgaaccattgcaaatcgacagggattctcctcgatggcttcggtcgtacgctggaaatgtgcaagcgcgatctgatttgggttgtgatcaaaatgcagattaaggttaaccgttatcccgcatggggtgatacggtggaaattaacacgcggttctcccgcctgggaaaaatcggcatgggacgcgattggctgatctccgattgcaacacgggcgagatcctcgtgcgcgctacttcggcctacgccatgatgaatcaaaaaacccggcgcctcagtaagctgccctacgaggtgcaccaagaaattgttccgttgtttgtggatagccctgtcatcgaggattcggatctgaaggtccataaattcaaagttaaaacgggagactcgatccaaaagggcttgacgccgggttggaatgacctggacgtcaatcagcatgtttcgaacgtgaaatacatcggctggattctggagtccatgccaaccgaagtgttggaaacccaggagttgtgttcgctcgctctcgaataccggcgcgaatgtggccgtgatagtgttctcgagagtgtcaccgccatggaccctagcaaagtcggggtgcgctctcagtatcaacacctgttgcgcttggaagacggcacagcgatcgtgaatggtgcgaccgagtggcgtccgaagaacgccggtgcgaatggtgcaatttcgactgggaagaccagcaatggtaatagtgtcagttag

SEQ ID NO: 123 - DNA, 1561 bp, Umbellularia californica
agagagagagagagagagagagctaaattaaaaaaaaaacccagaagtgggaaatcttccccatgaaataacggatcctcttgctactgctactactactactacaaactgtagccatttatataattctatataattttcaacatggccaccacctctttagcttccgctttctgctcgatgaaagctgtaatgttggctcgtgatggccggggcatgaaacccaggagcagtgatttgcagctgagggcgggaaatgcgccaacctctttgaagatgatcaatgggaccaagttcagttacacggagagcttgaaaaggttgcctgactggagcatgctctttgcagtgatcacaaccatcttttcggctgctgagaagcagtggaccaatctagagtggaagccgaagccgaagctaccccagttgcttgatgaccattttggactgcatgggttagttttcaggcgcacctttgccatcagatcttatgaggtgggacctgaccgctccacatctatactggctgttatgaatcacatgcaggaggctacacttaatcatgcgaagagtgtgggaattctaggagatggattcgggacgacgctagagatgagtaagagagatctgatgtgggttgtgagacgcacgcatgttgctgtggaacggtaccctacttggggtgatactgtagaagtagagtgctggattggtgcatctggaaataatggcatgcgacgtgatttccttgtccgggactgcaaaacaggcgaaattcttacaagatgtaccagcctttcggtgctgatgaatacaaggacaaggaggttgtccacaatccctgacgaagttagaggggagatagggcctgcattcattgataatgtggctgtcaaggacgatgaaattaagaaactacagaagctcaatgacagcactgcagattacatccaaggaggtttgactcctcgatggaatgatttggatgtcaatcagcatgtgaacaacctcaaatacgttgcctgggtttttgagaccgtcccagactccatctttgagagtcatcatatttccagcttcactcttgaatacaggagagagtgcacgagggatagcgtgctgcggtccctgaccactgtctctggtggctcgtcggaggctgggttagtgtgcgatcacttgctccagcttgaaggtgggtctgaggtattgagggcaagaacagagtggaggcctaagcttaccgatagtttcagagggattagtgtgatacccgcagaaccgagggtgtaactaatgaaagaagcatctgttgaagtttctcccatgctgttcgtgaggatactttttagaagctgcagtttgcattgcttgtgcagaatcatggtctgtggttttagatgtatataaaaaatagtcctgtagtcatgaaacttaatatcagaaaaataactcaatgggtcaaggttatcgaagtagtcatttaagctttgaaatatgttttgtattcctcggcttaatctgtaagctctttctcttgcaataaagttcgcctttcaat

SEQ ID NO: 124 - DNA, 975 bp, Artificial Sequence
  Codon optimized polynucleotide encoding mature form of C12FatB1 from Umbellularia californica
atgctgccggattggagtatgttgttcgcggtcattaccaccatcttctcggccgcggaaaagcagtggactaatctcgaatggaagcccaagcctaaattgccgcaactgttggatgatcactttggtctgcatggcctggtcttccgacgaactttcgccatccgctcttacgaggtcggtccagatcgatcgacgtccattctggcggtgatgaaccacatgcaggaagctacactgaatcacgccaagagtgtcggcatcctgggcgatggttttggtacgacgctcgagatgagtaagcgcgatttgatgtgggtggtccgccgcacacatgtggccgtcgaacgctatcctacgtggggtgacacggtcgaagtcgagtgttggatcggagccagcggcaataatgggatgcggcgcgattttctcgtgcgggattgtaagaccggtgaaattctgacacgttgcaccagcctctccgtcctgatgaacacgcggactcgccgcctgtcgactatcccggatgaagtgcgcggcgaaattgggcccgcatttatcgacaatgttgctgtcaaggatgacgagattaaaaaactgcaaaaactcaacgatagcactgccgattacattcaaggcggactcacgccgcgttggaacgacctcgacgttaaccagcacgtgaacaacctcaaatacgtggcatgggtcttcgaaaccgttccagacagcatcttcgaatctcatcatatcagctcgttcacgttggagtatcgtcgtgagtgcacccgggattccgtgttgcgatctctgaccaccgtttccgggggcagcagcgaggctggactcgtttgcgaccacctgctgcaattggaaggcggctcggaggtgctgcgagcacggaccgaatggcgcccgaaattgacggatagctttcggggcattagtgttatccccgccgagccccgcgtttag

SEQ ID NO: 125 - DNA, 975 bp, Artificial Sequence
  Codon optimized polynucleotide encoding mature form of C14FatB1 from Cinnamomum camphora
atgttgcccgattggagcatgttgttcgcagtcatcaccaccattttcagcgcagcggagaagcaatggaccaatttggagtggaaaccaaagccgaatccccctcagctgctggatgatcattttggaccccacgggttggtctttcgccgaacgtttgccatccgcagctatgaagtgggcccggatcgctcgacgagcattgttgctgttatgaatcacctgcaagaagcggctctgaatcatgctaagagcgtgggtatcttgggcgacggtttcgggacaactctggagatgtcgaagcgcgatctgatctgggtggtcaaacgtacccatgtggctgttgaacggtacccggcctggggagatactgtggaggttgagtgctgggttggcgcaagcggcaataacggccgccgacatgatttcctcgtgcgcgactgtaaaaccggcgaaattttgacccgatgcacctcgctcagtgtcatgatgaacacgcgcactcgtcggctgtccaaaatccccgaggaagtccgtggcgagatcggaccggcgttcattgacaacgtggcagtgaaggacgaagaaattaaaaagccgcagaagctgaacgattccacagcggattacatccagggtggtctgacgccccggtggaacgacctcgacattaaccagcacgtcaataacattaagtacgtggattggatcttggaaacagtgccggattcgatttttgagtcgcatcatatcagcagttttacgatcgaatatcgccgcgaatgtacgatggatagcgtgttgcagagcctcacgacagtctctggggggagtagtgaggccggtctggtctgcgaacacctgctccaactcgaaggcggttctgaagtgctccgtgccaaaactgagtggcgccctaaactcactgactcgtttcggggtatttccgtcattccagccgagtccagtgtttag

SEQ ID NO: 126 - DNA, 1430 bp, Cinnamomum camphora
tcaacatggccaccacctctttagcttctgctttctgctcgatgaaagctgtaatgttggctcgtgatggcaggggcatgaaacccaggagcagtgatttgcagctgagggcgggaaatgcacaaacctctttgaagatgatcaatgggaccaagttcagttacacagagagcttgaaaaagttgcctgactggagcatgctctttgcagtgatcacgaccatcttttcggctgctgagaagcagtggaccaatctagagtggaagccgaagccgaatccaccccagttgcttgatgaccattttgggccgcatgggttagttttcaggcgcacctttgccatcagatcgtatgaggtgggacctgaccgctccacatctatagtggctgttatgaatcacttgcaggaggctgcacttaatcatgcgaagagtgtgggaattctaggagatggattcggtacgacgctagagatgagtaagagagatctgatatgggttgtgaaacgcacgcatgttgctgtggaacggtaccctgcttggggtgatactgttgaagtagagtgctgggttggtgcatcgggaaataatggcaggcgccatgatttccttgtccgggactgcaaaacaggcgaaattcttacaagatgtaccagtctttcggtgatgatgaatacaaggacaaggaggttgtccaaaatccctgaagaagttagaggggagatagggcctgcattcattgataatgtggctgtcaaggacgaggaaattaagaaaccacagaagctcaatgacagcactgcagattacatccaaggaggattgactcctcgatggaatgatttggatatcaatcagcacgttaacaacatcaaatacgttgactggattcttgagactgtcccagactcaatctttgagagtcatcatatttccagcttcactattgaatacaggagagagtgcacgatggatagcgtgctgcagtccctgaccactgtctccggtggctcgtcggaagctgggttagtgtgcgagcacttgctccagcttgaaggtgggtctgaggtattgagggcaaaaacagagtggaggcctaagcttaccgatagtttcagagggattagtgtgatacccgcagaatcgagtgtctaactaacgaaagaagcatctgatgaagtttctcctgtgctgttgttcgtgaggatgctttttagaagctgcagtttgcattgcttgtgcagaatcatggcctgtggttttagatatatatccaaaattgtcctatagtcaagaaacttaatatcagaaaaataactcaatgagtcaaggttatcgaagtagtcatgtaagctttgaaatatgttgtgtattcctcggctttatgtaatctgtaagctctttctcttgcaataaatttcgcctttcaat

SEQ ID NO: 127 - DNA, 1744 bp, Cuphea hookeriana
ctttgatcggtcgatcctttcctctcgctcataatttacccattagtcccctttgccttctttaaaccctcctttcctttctcttcccttcttcctctctgggaagtttaaagcttttgcctttctcccccccacaacctctttcccgcatttgttgagctgtttttttgtcgccattcgtcctctcctcttcagttcaacagaaatggtggctaccgctgcaagttctgcattcttccccctcccatccgccgacacctcatcgagacccggaaagctcggcaataagccatcgagcttgagccccctcaagcccaaatcgacccccaatggcggtttgcaggttaaggcaaatgccagtgcccctcctaagatcaatggttccccggtcggtctaaagtcgggcggtctcaagactcaggaagacgctcattcggcccctcctccgcgaacttttatcaaccagttgcctgattggagtatgcttcttgctgcaatcacgactgtcttcttggctgcagagaagcaatggatgatgcttgattggaaacctaagaggcctgacatgcttgtggacccgtttggattgggaagtattgttcaggatgggcttgtgttcaggcagaatttttcgattaggtcctatgaaataggcgccgatcgcactgcgtctatagagacggtgatgaaccatttgcaggaaacagctctcaatcatgttaagattgctgggctttctaatgacggctttggtcgtactcctgagatgtataaaagggaccttatttgggttgttgcgaaaatgcaagtcatggttaaccgctatcctacttggggtgacacggttgaagtgaatacttgggttgccaagtcagggaaaaatggtatgcgtcgtgactggctcataagtgattgcaatactggagagattcttacaagagcatcaagcgtgtgggtcatgatgaatcaaaagacaagaagattgtcaaaaattccagatgaggttcgaaatgagatagagcctcattttgtggactctcctcccgtcattgaagacgatgaccggaaacttcccaagctggatgagaagactgctgactccatccgcaagggtctaactccgaggtggaatgacttggatgtcaatcaacacgtcaacaacgtgaagtacatcgggtggattcttgagagtactccaccagaagttctggagacccaggagttatgttcccttactctggaatacaggcgggaatgtggaagggagagcgtgctggagtccctcactgctatggatccctctggagggggttatgggtcccagtttcagcaccttctgcggcttgaggatggaggtgagatcgtgaaggggagaactgagtggcggcccaagaatggtgtaatcaatggggtggtaccaaccggggagtcctcacctggagactactcttagaagggagccctgacccctttggagttgtgatttctttattgtcggacgagctaagtgaagggcaggtaagatagtagcaatcggtagattgtgtagtttgtttgctgctttttcacgatggctctcgtgtataatatcatggtctgtcttctttgtatcctcttcttcgcatgttccgggttgattcatacattatattctttctatttgtttgaaggcgagtagcgggttgtaattatttattttgtcattacaatgtcgtttaacttttcaaatgaaactacttatgtg

SEQ ID NO: 128 - DNA, 990 bp, Artificial Sequence
  Codon optimized polynucleotide encoding mature form of C16FatB1 from Cuphea hookeriana
atgctgcctgactggtcgatgctgttggctgcaattactaccgtcttcctggcggctgaaaaacaatggatgatgttggactggaagcccaaacgacccgatatgctcgtcgatccgttcgggttgggcagcatcgttcaagacggtctggtgtttcgccaaaatttttccattcgatcttatgaaatcggcgctgaccggacagcatccatcgaaacggtcatgaaccatctccaagagaccgccctgaatcacgtgaagattgccggactctccaatgatggattcggccggaccccggaaatgtacaaacgcgatctgatctgggtggtcgccaagatgcaggtcatggtcaatcggtacccgacctggggggacacggttgaggtcaacacttgggtggcgaaatcgggtaagaacggcatgcgccgcgactggctcattagcgactgcaatacgggcgagatcctcacgcgtgccagttctgtgtgggtcatgatgaaccagaaaactcgacgcttgagcaagattccagatgaagttcgtaatgagattgaacctcattttgttgactcgccccccgtgatcgaggatgatgatcggaagctccccaagctggacgaaaaaacggcggatagcatccgcaaaggcctgacaccacggtggaacgatctggatgtcaatcaacacgtgaacaacgtgaaatacatcgggtggattctcgaatctacccccccagaagttctcgagactcaggagctgtgcagcttgacgttggagtaccgccgagaatgtggccgtgagtcggtgctggagagtctgaccgcaatggacccgtcgggcggtggttatggcagtcagtttcagcatttgctgcgcttggaggatggtggggaaattgtgaaaggtcggactgaatggcgccccaagaatggagtgattaatggtgttgtccctacaggcgaaagtagccccggggattatagttag

SEQ ID NO: 129 - DNA, 2595 bp, Artificial Sequence
  Codon-optimized S. cerevisiae phosphatidate phosphatase (PAH1)
atggaattccaatatgttggtcgggctttgggtagtgttagtaaaacgtggtcgagtatcaaccccgccaccctgagcggcgctatcgatgtcattgtcgtggaacaccccgatggccggctcagttgtagccccttccatgtgcgctttggtaaattccagattctgaaacccagccaaaagaaagtccaggtctttattaacgagaaactgtcgaatatgcccatgaaactctcggatagcggcgaggcgtacttcgtttttgagatgggtgatcaagtgacggatgtcccggatgaactgctcgtctcgccggtcatgagtgccacgagtagtccgccccaatcgccggaaacctcgattctcgaaggcggtaccgaaggcgagggcgaaggtgagaatgaaaataagaaaaaggaaaagaaggtgttggaggagcccgactttctggacattaatgacaccggtgacagcggcagcaagaacagtgagacgacgggttcgctctcgccgaccgaaagtagtacgacgacgccgcccgatagcgtcgaggaacgcaagttggtcgaacaacggaccaagaattttcagcaaaagctgaataagaaactgaccgaaatccatattccgagcaaattggacaataacggtgatttgctcctggacaccgagggttataagccgaataaaaacatgatgcacgacacggatattcagctgaagcaattgctcaaggatgagttcggtaacgatagcgatatttcgagcttcatcaaagaagacaagaatggcaacattaaaatcgtgaacccctatgagcatttgaccgatttgagtcccccgggtacgcccccgaccatggccacgagtggcagtgtcctgggcttggatgcgatggagagtggttcgacgctgaacagcttgagcagcagcccgagcggcagtgacaccgaggatgagacgagctttagcaaggaacagtcgtcgaagagtgaaaaaacgtcgaagaaaggcaccgcgggttcgggtgaaacggagaaacgctacatccgcacgatccggctcacgaatgatcagctgaaatgcctcaacttgacgtacggtgaaaatgacttgaaatttagtgttgaccatggcaaagccattgtgaccagcaaattgtttgtctggcgctgggacgtccccatcgttatcagcgacattgacggtacgattacgaaaagtgatgcgctgggccacgtcctcgccatgatcggcaaagattggacccatctcggcgtcgctaagctgttcagtgagatctcgcgcaacggttacaatatcctgtacctgaccgcgcgctcggccggtcaggctgacagtacccgctcgtatctccgcagtattgagcagaacggtagcaagctcccgaacggccccgtcattctgagccccgatcggaccatggctgccctgcgccgggaggtgattctgaaaaagcccgaagtctttaaaatcgcttgcttgaacgatatccgctcgctctatttcgaagactcggataacgaagtggacacggaggaaaagagcacgccgtttttcgcgggctttggcaatcggatcaccgatgcgctcagctatcggacggtcggcatcccgagtagccgcatcttcacgattaacacggaaggcgaggtgcacatggagctgctcgagctcgccggttaccggagtagctatatccatatcaacgaactggtcgatcacttcttcccgccggtgagcctggactcggtcgatctgcgcacgaacacgagcatggtcccgggcagcccgccgaaccgcaccctggataactttgatagcgaaatcaccagtggccgcaagacgttgtttcgcggtaatcaggaggaaaaattcacggacgtcaacttttggcgcgatccgttggtggacatcgacaacctctcggatatcagtaacgatgattcggacaatattgatgaagacaccgatgtgagccaacagtcgaacatcagccgcaaccgcgctaactcggtcaagacggccaaggtgaccaaggctccgcagcggaatgtgtcgggcagtacgaataacaatgaagttctggctgcgagtagtgatgttgaaaatgccagtgacttggttagcagccactcgagtagcggctcgacccccaacaagtcgacgatgagtaagggtgatatcggcaaacaaatctatctggaactgggctcgcccttggcgagtcccaaactccggtatctggacgatatggatgatgaggactcgaactataatcgcaccaagagccgccgggctagtagcgccgctgctaccagcatcgacaaggagtttaaaaagctcagtgtgagtaaagctggcgctcccacccgcatcgttagcaagatcaacgtgtcgaatgatgtgcacagtttgggcaacagtgataccgaaagccggcgggaacagagcgtcaatgaaaccggtcgcaatcagttgccgcacaatagtatggatgataaggatttggattcgcgggtgagtgacgagttcgatgacgatgagtttgatgaagatgagtttgaggattag

SEQ ID NO: 130 - DNA, 2589 bp, Artificial Sequence
  Synthetic construct Saccharomyces cerevisiae clone FLH148377.01X SMP2 gene
atgcagtacgtaggcagagctcttgggtctgtgtctaaaacatggtcttctatcaatccggctacgctatcaggtgctatagatgtcattgtagtggagcatccagacggaaggctatcatgttctccctttcatgtgaggttcggcaaatttcaaattctaaagccatctcaaaagaaagtccaagtgtttataaatgagaaactgagtaatatgccaatgaaactgagtgattctggagaagcctatttcgttttcgagatgggtgaccaggtcactgatgtccctgacgaattgcttgtgtcgcccgtgatgagcgccacatcaagcccccctcaatcacctgaaacatccatcttagaaggaggaaccgagggtgaaggtgaaggtgaaaatgaaaataagaagaaggaaaagaaagtgctagaggaaccagattttttagatatcaatgacactggagattcaggcagtaaaaatagtgaaactacagggtcgctttctcctactgaatcctctacaacgacaccaccagattcagttgaagagaggaagcttgttgagcagcgtacaaagaactttcagcaaaaactaaacaaaaaactcactgaaatccatatacccagtaaacttgataacaatggcgacttactactagacactgaaggttacaagccaaacaagaatatgatgcatgacacagacatacaactgaagcagttgttaaaggacgaattcggtaatgattcagatatttccagttttatcaaggaggacaaaaatggcaacatcaagatcgtaaatccttacgagcaccttactgatttatctcctccaggtacgcctccaacaatggccacaagcggatcagttttaggcttagatgcaatggaatcaggaagtactttgaattcgttatcttcttcaccttctggttccgatactgaggacgaaacatcatttagcaaagaacaaagcagtaaaagtgaaaaaactagcaagaaaggaacagcagggagcggtgagaccgagaaaagatacatacgaacgataagattgactaatgaccagttaaagtgcctaaatttaacttatggtgaaaatgatctgaaattttccgtagatcacggaaaagctattgttacgtcaaaattattcgtttggaggtgggatgttccaattgttatcagtgatattgatggcaccatcacaaaatcggacgctttaggccatgttctggcaatgataggaaaagactggacgcacttgggtgtagccaagttatttagcgagatctccaggaatggctataatatactctatctaactgcaagaagtgctggacaagctgattccacgaggagttatttgcgatcaattgaacagaatggcagcaaactaccaaatgggcctgtgattttatcacccgatagaacgatggctgcgttaaggcgggaagtaatactaaaaaaacctgaagtctttaaaatcgcgtgtctaaacgacataagatccttgtattttgaagacagtgataacgaagtggatacagaggaaaaatcaacaccattttttgccggctttggtaataggattactgatgctttatcttacagaactgtggggatacctagttcaagaattttcacaataaatacagagggtgaggttcatatggaattattggagttagcaggttacagaagctcctatattcatatcaatgagcttgtcgatcatttctttccaccagtcagccttgatagtgtcgatctaagaactaatacttccatggttcctggctccccccctaatagaacgttggataactttgactcagaaattacttcaggtcgcaaaacgctatttagaggcaatcaggaagagaaattcacagacgtaaatttttggagagacccgttagtcgacatcgacaacttatcggatattagcaatgatgattctgataacatcgatgaagatactgacgtatcacaacaaagcaacattagtagaaatagggcaaattcagtcaaaaccgccaaggtcactaaagccccgcaaagaaatgtgagcggcagcacaaataacaacgaagttttagccgcttcgtctgatgtagaaaatgcgtctgacctggtgagttcccatagtagctcaggatccacgcccaataaatctacaatgtccaaaggggacattggaaaacaaatatatttggagctaggttctccacttgcatcgccaaaactaagatatttagacgatatggatgatgaagactccaattacaatagaactaaatcaaggagagcatcttctgcagccgcgactagtatcgataaagagttcaaaaagctctctgtgtcaaaggccggcgctccaacaagaattgtttcaaagatcaacgtttcaaatgacgtacattcacttgggaattcagataccgaatcacgaagggagcaaagtgttaatgaaacagggcgcaatcagctaccccacaactcaatggacgataaagatttggattcaagagtaagcgatgaattcgatgacgatgaattcgacgaagatgaattcgaagattag

SEQ ID NO: 131 - protein, 864 aa, Saccharomyces cerevisiae
MEFQYVGRALGSVSKTWSSINPATLSGAIDVIVVEHPDGRLSCSPFHVRFGKFQILKPSQKKVQVFINEKLSNMPMKLSDSGEAYFVFEMGDQVTDVPDELLVSPVMSATSSPPQSPETSILEGGTEGEGEGENENKKKEKKVLEEPDFLDINDTGDSGSKNSETTGSLSPTESSTTTPPDSVEERKLVEQRTKNFQQKLNKKLTEIHIPSKLDNNGDLLLDTEGYKPNKNMMHDTDIQLKQLLKDEFGNDSDISSFIKEDKNGNIKIVNPYEHLTDLSPPGTPPTMATSGSVLGLDAMESGSTLNSLSSSPSGSDTEDETSFSKEQSSKSEKTSKKGTAGSGETEKRYIRTIRLTNDQLKCLNLTYGENDLKFSVDHGKAIVTSKLFVWRWDVPIVISDIDGTITKSDALGHVLAMIGKDWTHLGVAKLFSEISRNGYNILYLTARSAGQADSTRSYLRSIEQNGSKLPNGPVILSPDRTMAALRREVILKKPEVFKIACLNDIRSLYFEDSDNEVDTEEKSTPFFAGFGNRITDALSYRTVGIPSSRIFTINTEGEVHMELLELAGYRSSYIHINELVDHFFPPVSLDSVDLRTNTSMVPGSPPNRTLDNFDSEITSGRKTLFRGNQEEKFTDVNFWRDPLVDIDNLSDISNDDSDNIDEDTDVSQQSNISRNRANSVKTAKVTKAPQRNVSGSTNNNEVLAASSDVENASDLVSSHSSSGSTPNKSTMSKGDIGKQIYLELGSPLASPKLRYLDDMDDEDSNYNRTKSRRASSAAATSIDKEFKKLSVSKAGAPTRIVSKINVSNDVHSLGNSDTESRREQSVNETGRNQLPHNSMDDKDLDSRVSDEFDDDEFDEDEFED

SEQ ID NO: 132 - DNA, 861 bp, Escherichia coli
atgagtcaggcgctaaaaaatttactgacattgttaaatctggaaaaaattgaggaaggactctttcgcggccagagtgaagatttaggtttacgccaggtgtttggcggccaggtcgtgggtcaggccttgtatgctgcaaaagagaccgtccctgaagagcggctggtacattcgtttcacagctactttcttcgccctggcgatagtaagaagccgattatttatgatgtcgaaacgctgcgtgacggtaacagcttcagcgcccgccgggttgctgctattcaaaacggcaaaccgattttttatatgactgcctctttccaggcaccagaagcgggtttcgaacatcaaaaaacaatgccgtccgcgccagcgcctgatggcctcccttcggaaacgcaaatcgcccaatcgctggcgcacctgctgccgccagtgctgaaagataaattcatctgcgatcgtccgctggaagtccgtccggtggagtttcataacccactgaaaggtcacgtcgcagaaccacatcgtcaggtgtggatccgcgcaaatggtagcgtgccggatgacctgcgcgttcatcagtatctgctcggttacgcttctgatcttaacttcctgccggtagctctacagccgcacggcatcggttttctcgaaccggggattcagattgccaccattgaccattccatgtggttccatcgcccgtttaatttgaatgaatggctgctgtatagcgtggagagcacctcggcgtccagcgcacgtggctttgtgcgcggtgagttttatacccaagacggcgtactggttgcctcgaccgttcaggaaggggtgatgcgtaatcacaattaa

SEQ ID NO: 133 - protein, 208 aa, Escherichia coli
MMNFNNVFRWHLPFLFLVLLTFRAAAADTLLILGDSLSAGYRMSASAAWPALLNDKWQSKTSVVNASISGDTSQQGLARLPALLKQHQPRWVLVELGGNDGLRGFQPQQTEQTLRQILQDVKAANAEPLLMQIRLPANYGRRYNEAFSAIYPKLAKEFDVPLLPFFMEEVYLKPQWMQDDGIHPNRDAQPFIADWMAKQLQPLVNHDS

SEQ ID NO: 134 - protein, 286 aa, Escherichia coli
MSQALKNLLTLLNLEKIEEGLFRGQSEDLGLRQVFGGQVVGQALYAAKETVPEERLVHSFHSYFLRPGDSKKPIIYDVETLRDGNSFSARRVAAIQNGKPIFYMTASFQAPEAGFEHQKTMPSAPAPDGLPSETQIAQSLAHLLPPVLKDKFICDRPLEVRPVEFHNPLKGHVAEPHRQVWIRANGSVPDDLRVHQYLLGYASDLNFLPVALQPHGIGFLEPGIQIATIDHSMWFHRPFNLNEWLLYSVESTSASSARGFVRGEFYTQDGVLVASTVQEGVMRNHN

SEQ ID NO: 135 - DNA, 1023 bp, Escherichia coli
atgtttcagcagcaaaaagactgggaaacaagagaaaacgcgtttgctgcttttaccatgggaccgctgactgatttctggcgtcagcgtgatgaagcagagtttactggtgtggatgacattccggtgcgctttgtccgttttcgcgcacagcaccatgaccgggtggtagtcatctgcccggggcgtattgagagctacgtaaaatatgcggaactggcctatgacctgttccatttggggtttgatgtcttaatcatcgaccatcgcgggcagggacgttccggtcgcctgttagccgatccgcatctcgggcatgttaatcgctttaatgattatgttgatgatctggcggcattctggcagcaggaggttcagcccggtccgtggcgtaaacgctatatactggcacattcgatgggcggtgcgatctccacattatttctgcaacgccatccaggtgtatgtgacgccattgcgctaactgcgccaatgtttgggatcgtgattcgtatgccgtcatttatggcacggcagatcctcaactgggccgaagcgcatccacgtttccgtgatggctatgcaataggcaccgggcgctggcgcgcgttgccgtttgctatcaacgtactgacccacagcagacagcgatatcgacgtaacttacgcttctatgctgatgacccaacgattcgcgtcggtgggccgacctaccattgggtacgcgaaagtattctggctggcgaacaggtgttagccggtgcgggtgatgacgccacgccaacgcttctcttgcaggctgaagaggaacgcgtggtggataaccgcatgcatgaccgtttttgtgaactccgcaccgccgcgggccatcctgtcgaaggaggacggccgttggtaattaaaggtgcttaccatgagatcctttttgaaaaggacgcaatggcctcagtcgcgctccacgccatcgttgattttttcaacaggcataactcacccagcggaaaccgctctacagaggtttaa

SEQ ID NO: 136 - DNA, 1203 bp, Artificial Sequence
  Vupat1 - nucleotide sequence codon optimized for S. elongatus 7942.
atggccgccacacagacccctagtaaagttgacgatggtgcactgattacggtgctctcgattgacggggggggtatccgcgggatcatccctgggattctcctcgcgttcctcgagagcgaattgcaaaaactggatggtgctgatgcccgtctcgccgactactttgatgtcatcgcaggcacttctaccggaggcttggttactgctatgctgaccgcgccaaatgagaataatcgccccctctacgctgctaaagatattaaagatttctatctcgaacacaccccaaaaatctttccgcagtcgtcgagctggaacctgattgccaccgcgatgaagaagggccgcagcctgatggggccacagtacgacggcaaatacctgcataaattggtccgtgaaaaactgggcaatacgaagctcgagcacactctgaccaacgtggtcatcccggcgttcgacatcaaaaatctgcaacccgccattttcagtagcttccaagttaagaaacgcccctacctcaatgcagccctcagcgacatttgtatctcgaccagcgctgcacccacgtatctgccagcgcactgctttgaaacaaagacttcgacggccagtttcaagtttgacttggtggatgggggcgtcgctgcgaataaccctgcgttggtcgccatggccgaggtctcgaacgaaatccgcaacgagggttcgtgcgcttccctgaaggtgaaaccgctgcagtacaaaaagtttctggtcatttctctgggaaccggctcccagcaacacgaaatgcgatattccgcagataaggccagcacgtggggcttggtcggatggctcagctcgtccggtggcaccccgctgattgacgtcttctctcatgcgagctccgatatggttgattttcatattagtagtgtgtttcaagcccgccacgcagaacaaaactacctgcggattcaagacgataccctgacgggtgatctgggctccgtcgatgttgccacagagaagaatttgaacggtctcgtgcaggtggccgaagcgttgctgaagaagcccgttagcaaaatcaatttgcgtacgggtatccacgaaccggttgaatctaacgaaacgaatgctgaagcgttgaagcggtttgcagcacggttgtctaaccagcggcgatttcgcaaaagtcagactttcgcttag

SEQ ID NO: 137 - protein, 340 aa, Escherichia coli
MFQQQKDWETRENAFAAFTMGPLTDFWRQRDEAEFTGVDDIPVRFVRFRAQHHDRVVVICPGRIESYVKYAELAYDLFHLGFDVLIIDHRGQGRSGRLLADPHLGHVNRFNDYVDDLAAFWQQEVQPGPWRKRYILAHSMGGAISTLFLQRHPGVCDAIALTAPMFGIVIRMPSFMARQILNWAEAHPRFRDGYAIGTGRWRALPFAINVLTHSRQRYRRNLRFYADDPTIRVGGPTYHWVRESILAGEQVLAGAGDDATPTLLLQAEEERVVDNRMHDRFCELRTAAGHPVEGGRPLVIKGAYHEILFEKDAMASVALHAIVDFFNRHNSPSGNRSTEV

SEQ ID NO: 138 - protein, 400 aa, Synechococcus elongatus PCC 7942
MAATQTPSKVDDGALITVLSIDGGGIRGIIPGILLAFLESELQKLDGADARLADYFDVIAGTSTGGLVTAMLTAPNENNRPLYAAKDIKDFYLEHTPKIFPQSSSWNLIATAMKKGRSLMGPQYDGKYLHKLVREKLGNTKLEHTLTNVVIPAFDIKNLQPAIFSSFQVKKRPYLNAALSDICISTSAAPTYLPAHCFETKTSTASFKFDLVDGGVAANNPALVAMAEVSNEIRNEGSCASLKVKPLQYKKFLVISLGTGSQQHEMRYSADKASTWGLVGWLSSSGGTPLIDVFSHASSDMVDFHISSVFQARHAEQNYLRIQDDTLTGDLGSVDVATEKNLNGLVQVAEALLKKPVSKINLRTGIHEPVESNETNAEALKRFAARLSNQRRFRKSQTFA

SEQ ID NO: 139 - DNA, 552 bp, Escherichia coli
atggctgatacattgctgattttgggtgatagtttgtctgcgggttaccgcatgagcgccagcgccgcctggccagccctcctgaatgataaatggcagtccaaaacgagcgttgtcaatgcgtctattagtggcgataccagtcaacagggactggctcgcctcccggccttgctgaaacagcatcaaccgcgctgggtgctggtcgaactcggagggaatgatggtctgcgcggttttcaacctcagcaaaccgagcaaacgctccgtcaaattctgcaggacgttaaggcggcgaacgctgagcccctgctgatgcagattcgcctccccgccaattacgggcgtcgctataacgaagcgttttcggcgatttacccgaagctcgccaaagaatttgatgtcccactgctcccctttttcatggaagaagtctatctcaaaccacaatggatgcaggatgatggcattcatcccaaccgcgacgcgcaaccctttattgcggattggatggcgaaacaactccaaccactcgtgaaccacgattcgtag

SEQ ID NO: 140 - DNA, 1161 bp, Acinetobacter sp ADP1
atggcgtttagatttattgaggggattcccacaagtttgggcgtgttcggtgtggtaggttcattgtgtatgtcgcatgcacatgcaattgaagctgtacagacttctgcaacaattacgcccaccagtcctgcggcttgcattggtttggagtcgaattcagatcgtctggcttgttatgatgctctgtttaaagtagcagatacggcaaaaacaactccagttattgaacaaaaagctgctttgaacccttcgccgtcggtagagcagtctgagctcaatcctcaatctattaaggaaaaaattggtaatctttttgcgattgaaggtccaagaattgatccgaatacatccttactggataggcgctgggagctctccgaaaaatcaaaattaggtacatggaatattcgtggttataaacctgtctatttattacctattttttggacatctaaaaagaatgaatttccttcgagtccaaatcctgaaaatacagtgcatgaaaatcagaatttaacttcggctgaatccaagtttcaattatctttaaaaaccaaagcctgggaaaatatttttggcaataacggagatttatggctagggtatacccagtcttctcgttggcaggtttacaatgcagacgagtcacgtccgtttcgtgaaaccaattatgaacctgaggcaagcctaattttccgaaccaattatgagttcttgggattaaacggccgacttttgggggtaactttaaatcaccagtcaaatggtcgttctgatccattatcaagaagctggaatcgtgtcatctttaatataggattagagcgagataattttgcgctggtactcagaccatggattcgtattcaagaagaagccaagaacgacaataatcccgatatcgaggattatgtaggacgtggtgatttaactgctttttatcgctggaaagataatgatttttctttaatgctgcgtcattcattaaaagatggtgataaatcgcatggtgcggtgcagtttgattgggctttcccaatttcaggtaagcttcgtggaaattttcagttatttaatggttacggtgaaagcctgattgattataaccatcgtgcaacttatgttggtttgggcgtttcactgatgaactggtattga

SEQ ID NO: 141 - DNA, 870 bp, Escherichia coli
atgcggactctgcagggctggttgttgccggtgtttatgttgcctatggcagtatatgcacaagaggcaacggtgaaagaggtgcatgacgcgccagcggtgcgtggcagtattatcgccaatatgctgcaggagcatgacaatccgttcacgctctatccttatgacaccaactacctcatttacacccaaaccagcgatctgaataaagaagcgattgccagttacgactgggcggaaaatgcgcgtaaggatgaagtaaagtttcagttgagcctggcatttccgctgtggcgtgggattttaggcccgaactcggtgttgggtgcgtcttatacgcaaaaatcctggtggcaactgtccaatagcgaagagtcttcaccgtttcgtgaaaccaactacgaaccgcaattgttcctcggttttgccaccgattaccgttttgcaggttggacgctgcgcgatgtggagatggggtataaccacgactctaacgggcgttccgacccgacctcccgcagctggaaccgcctttatactcgcctgatggcagaaaacggtaactggctggtagaagtgaagccgtggtatgtggtgggtaatactgacgataacccggatatcaccaaatatatgggttactaccagcttaaaatcggctatcacctcggtgatgcggtgctcagtgcgaaaggacagtacaactggaacaccggctacggcggcgcggagttaggcttaagttacccgatcaccaaacatgtgcgcctttatactcaggtttacagcggctatggcgaatcgctcatcgactataacttcaaccagacccgtgtcggtgtgggggttatgctaaacgatttgttttga

SEQ ID NO: 142 - DNA, 1188 bp, Streptomyces coelicolor A3(2)
atgaccgtcgttgaaccgactcccggtgccgaccgggtcagcatccaacggctgcgtcgccgtttggaaaggctgatcggtgtcgccgccaccgaagggaacgaactcgtcgcgctgcgcaacggcgacgagatcttccccgccatgctgggggcgatccgggcggccgagcacacgatcgacatgatgacgttcgtgtactggcgcgggcagatagcccgcgacttcgccgccgctctcgccgaccgggcccggtcgggagtacgggtccggctgctgctggacggcttcggcgccaaggagatcgaacaggacctgctggacgctatggaggccgcgggagtacagatcgcctggttccgtaaaccgctgtggctgtcgccgttcaagcagaaccaccgctgccaccgcaaggccctcgtcattgacgagcacactgccttcaccggaggcgtcggcatcgccgaggagtggtgcggcgacgcccgcggccccggcgagtggcgcgacacccacgtccaggtgcgcggcccggccgtggacggcgtcgccgccgccttcgcccagaactgggccgagtgccacgacgagttgtacgacgaccgggaccggttctccgatcacacccagcccggcacatccatcgtccaggtggtgcgcggttcggccagcttcggttggcaggacatgcagaccctcatccgcgtcatgctcacctccgcggagcaccgcttccgcctggcgaccgcctacttcgccccggatacatacttcatcgacctgctctgcgccaccgcccggcgcggtgtcacggtggagatcctgctccccggcccgcatacggaccagcgggcctgccaactggccggccagtaccactacacccgtttgctggacgccggggtgtcaattcgcgagtaccagccgaccatgatgcacgccaagatcatcaccgtggacgggctggccgccctgatcgggtccaccaacttcaaccggcgctccatggaccacgacgaggagatcatgctcgccgtcctggaccaggagttcaccaacggcctggaccgggacttcgacgccgacctggaacgcagcaccgccatcgagccgacccgctggaagcgccgcgccaccctgcgacgcctccgggagacggccgtcctgcccctgcgccggttcctgtga

SEQ ID NO: 143 - DNA, 658 bp, Arabidopsis thaliana
attcgtcttctaccttcttctaactcacttcattttcaccaaaaccaacaaatatattcttctcactttccgagctttccagttcaactatggcggctccgatcatacttttctctttccttttattcttctctgtctctgtctcggcacttaacgtcggtgttcagctcatacatccctccatttccttgactaaagaatgtagccggaaatgtgaatcagagttttgttcagtgcctccatttctgaggtatgggaagtactgtggactactttacagtggatgtcctggtgagagaccttgtgatggtcttgattcttgttgcatgaaacatgatgcttgtgtccaatccaagaataatgattatctaagccaagagtgtagtcagaagttcattaactgcatgaacaatttcagccagaagaagcaaccgacgttcaaaggtaacaaatgcgacgctgatgaagtgattgatgtcatctccattgtcatggaagctgctcttatcgccggcaaagtcctcaagaaaccctaactatttatatatatttttctatatttctagttacaattgtttccctttttttccccctcaggacatttgtcttaatttatcaaaatactattaagtaatactatagcttttttttttttgtc

SEQ ID NO: 144 - DNA, 1074 bp, Arabidopsis thaliana
atggagtatcaggggcttcaaaattgggacggtcttttagacccattggacgacaatctccggcgagagattctccggtacggtcaatttgtcgaatcggcttatcaagcatttgatttcgatccttcctctccaacctacgggacatgccggtttccgaggagcacgttgttagagcgatccggtttacccaactccggttatcgactaacgaagaaccttcgtgccacgtcaggtattaacttgccacgttggattgagaaagcgccaagctggatggctacacaatctagctggattggttacgtggcagtttgccaggacaaagaagagatctcgcggcttgggcgtagagacgtcgtcatctccttccgtggaaccgccacgtgtctcgagtggttagagaaccttcgcgccacgctgactcatctccctaatgggcctactggagcaaatctaaacgggtctaactctgggcccatggttgagagcgggtttttaagcttgtatacttcaggtgttcacagtttgagagacatggtaagagaagagatcgcaaggctactccaatcttacggcgacgagccgttaagtgtaacgataaccggtcacagcctcggcgctgcgatcgcgacactagcagcttacgatatcaaaacgacgtttaaacgtgcgcctatggttaccgtaatatctttcggaggtccacgtgtcggaaacagatgctttcggaaactccttgagaagcaaggcacgaaggttctaagaatcgtgaactccgacgacgtcatcaccaaagttcctggagttgttttagaaaacagagagcaagataacgttaagatgacagcgtcgataatgccgagctggatacagagacgcgtggaggagacgccgtgggtttacgctgaaatcggtaaggagcttcggctgagtagccgtgactcgccgcacttgagcagcatcaatgtggccacgtgtcatgagctgaaaacgtatttacatttggtagacgggtttgtgagctccacgtgtccattcagagaaacagctcggagagttctccatagatga

SEQ ID NO: 145 - DNA, 1416 bp, Arabidopsis thaliana
atggcggccaaagtcttcactcagaaccctatctattctcaatctctagttagagacaaaactcctcaacagaaacacaatcttgaccatttctctatatcccagcacacctctaaaagactcgttgtctcttcttctacaatgtcccctccgatttcatcttctccactctctcttccttcttcttcttcttctcaggccattcctccttctcgagcacctgcagtgactctaccgttgtctcgggtttggagagagatacaagggagcaataactgggaaaatctcattgaacctctaagccctattctccaacaagagatcactcgctacgggaacttactctccgcttcttacaaagggtttgatctaaaccctaactccaaacgttacttgagttgcaagtatggaaaaaagaacttgcttaaagaatccggaatccatgaccctgatggctaccaagtcaccaagtatatctacgccacaccagacatcaacctcaaccctatcaagaacgagcctaaccgtgcacgttggatcggttatgtagcggtttcttctgatgaatcggtgaaacgtttgggaaggagggatattttggtgacgtttcgtggcactgtcaccaaccatgagtggttagctaacctaaagagctctttgactccggctaggcttgatcctcataaccctcgtcctgatgtcaaggtcgaatccgggttcttaggtttatacacatccggtgagagcgagagcaaattcgggctagaaagctgccgtgagcagcttctctccgagatctcgaggcttatgaacaagcacaaaggcgaggaaataagcataacacttgcgggacatagtatggggagttctctagctcagcttctagcttacgacatagcggaactcggtatgaaccagagaagggacgaaaaacctgttccggtgaccgtgttttcgtttgctggtcctagagttggtaacttggggttcaaaaaacggtgtgaggagctaggagttaaagtcttgaggatcacgaatgtaaacgatccgatcaccaaacttccaggtttcttatttaatgagaatttcagatctttaggtggtgtttacgagcttccttggagctgttcttgctacactcacgtgggagtcgaactcaccctcgatttcttcgatgttcaaaacatttcttgtgtccatgacctcgagacttacatcactctagtaaaccgtccgagatgctcgaaattggcggttaatgaagacaattttggcggcgagtttttgaacagaacaagtgaactgatgttcagtaagggacgacgtcaagcgttgcattttacaaacgcagcgaccaatgcggcatatctactttgttctatatccaaccatatgttgtattataatatattttag

SEQ ID NO: 146 - DNA, 1285 bp, Arabidopsis thaliana
aatcgccctccaagaaaaacaaaccgccatcgtgcggatcactcgtaaccatcctcagccttgatggtggtggagtcagaggaatcatcgccggagtaatccttgcctttctcgaaaaacaacttcaggaactcgatggagaagaggcgaggcttgcggattacttcgacgtgatagctggaactagcaccggtggtcttgtgacggcgatgttgactgtaccggacgagaccggtcgacctcatttcgcggctaaagacattgtgccgttttaccttgaacattgtcccaagatatttccccagcccacaggcgtgcttgctctgttaccgaagcttccaaagcttctgtctggtccaaagtacagcggaaagtatctgcgaaatcttctgagtaagcttcttggagagacaagacttcaccagaccctcacaaacattgttatacctaccttcgatatcaagaaacttcaacccactattttctcctcttaccagctgttggttgaccctagcttggatgtcaaggtatcagacatatgcatcggcacttcagctgctcccactttctttcctccccattacttttccaacgaagacagtcaaggcaataagacggagtttaatctcgttgatggcgcggttactgctaataacccgactttggtggccatgacagctgtgtctaagcagattgtgaagaataatcctgatatgggtaagctcaagccgttaggtttcgaccggtttctcgttatatcgataggaacaggatcaacaaaaagggaagagaagtacagcgcaaaaaaggctgcaaaatgggggatcatatcttggttatatgacgatggatctactccgatattagacattaccatggaatcaagccgcgacatgatccattatcacagctctgttgtgtttaaagccctacaatctgaagacaagtacctccgaatcgatgatgatacattggaaggagatgtaagcactatggatctagcgacaaagtctaacttggagaatcttcaaaagattggagagaagatgctgacaaacagagtcatgcaaatgaacatcgacactggtgtatatgaacctgttgctgaaaatattaccaatgatgaacagctaaagaggtatgcaaaaattctctcggacgaaaggaaattaaggagactaagaagcgacacaatgattaaagattcatcaaatgaatcacaagagataaaataaaaggaaatcattcgtgcttttgtgtgaaattgtttgttgcatatgtttta

SEQ ID NO: 147 - DNA, 2061 bp, Anabaena variabilis ATCC 29413
gtgataaatctagcaaatacacaaacagtcttaaaatttgatgggatagatgattatatagattttggcaaaaacgatattggtggtgtttttgctcaagggagttcatgttttacggtttcaggatggataaatcctcataaattaacagaaaaatccactagctatggaacgcggaatgtattttttgctcgttcttcagatcgatacagtgataattttgaattcggtatcagtgagacagggagtttagatatcttcattgatgaaaccattagcaagggtatcagaacttttggtaatggagaattaactataggacaatggcactttttcgccattgtttttaatagcggtcaaatcacagtatatcttgatgatcatgaatacaatgactctctgagaggttcatctttaaacaaagcaacaagctctgtaactttgggtgcaaccttacacaagcaagtctattttacaggacaattagcaaacatcagcgtctggaattatccatgtactcaggtacaaattaagacccatcattgtgggctaatagtcggggatgaaccaggattagtggcttactggaaattagatgaaggccaaggaacaacagttaaaaacaaagctggaaaatcttatcaaggaaattttcggggtaatcctagctgggatttagcgcaaattccatttgcagcaccattatccagtcaagacgatatccaggaggatgtccaatttgagataggaattattgccgaaacaagtatttcaacattaactacagatttattggcagcaacagtaccgctagttagtaacaacgaagaccaaacaatagaaattcaatatccagaaataaatagcgaaaaatcagagattattgcaaacttgatcaatctcccatcacatgaagaagcaagcaaaacagaccaaactgaagttcttgtaaatagccaacaattacaaacattcattcaggcagaatcgccagaaaccatgaatacaaaatcccgtcccagatataaaatactttccattgatggtggtggtattcggggcattattcctgcattactcttagcagaaattgaacgacggacacaagagcctatatttagtttatttgacttaattgctggtacttcaagcggcggaattttagcactgggactaactaaaccccgattaaattcatctgaagaattgcccttagctgaatacaccgctgaagaccttgtacaattatttcttgagtatggagtagaaatattttatgagccattatttgaaagactacttggcccgttagaagatatatttctccagccaaaatatccttccacaagcaaagaagaaatcttaaggcaatatttgggtaaaactcctctagtaaataatcttaaagaagtttttgtcactagttacgatatcgagcagcgaattccggtattttttacaaaccaactagaaaaacagcaaatagaatctaagaattctcataatttatgtggtaatgtatccctcttagatgccgcattagccactagtgctaccccgacttattttgctcctcatcgtatcgtcagccccgaaaatagtgcgatcgcttatactttaattgacgggggagtatttgctaataacccagcccatttagctattttagaagcgcaaattagtagtaaacgcaaagcccaaacagtccttaatcaagaagatattttagtagtttctttaggtacaggttcgccaacaagtgcttatccttataaagaagtcaagaattggggacttttacaatggggaagaccacttttaaatattgtgtttgacggtggtagcggtgtggtatctggagaattagaacagttgtttgaacctagcgataaagaagctaaaagtttttattatcgctttcaaacattgttagatgcagagttagaagcaatagataatacgaaactacaaaatactcgtcagctacaagctatagcccacaaactgatttctgaaaaaagtcaacaaatcgatgaactttgtgagcttttgttgggctaa

SEQ ID NO: 148 - DNA, 1995 bp, Saccharomyces cerevisiae S288c
atgaagttgcagagtttgttggtttctgctgcagttttgacttctctaacagagaacgttaacgcttggtcaccaaataacagttacgtccctgcgaacgtaacctgtgatgatgatattaacttagtcagagaagcatctggtttgtcagataacgaaacagaatggctgaaaaaaagagatgcatacaccaaggaggctttgcattcttttttgaatagggccacttcgaatttcagtgacacttccttgctatccactctttttggtagcaactcttccaatatgcctaagattgccgtcgcctgttctggtggtggttaccgtgccatgttgtctggtgctggtatgcttgctgctatggacaatcgtactgatggcgcaaatgagcatggtcttggtgggctgctgcaaggtgcaacttacttggcaggtctgtcgggtggtaactggttaacaagtactttggcttggaacaactggacgtctgtgcaagctatcgtggataatacaacagaatctaactcaatttgggacatctctcattcaattcttaccccagacggcattaacatctttaagactgggagtagatgggacgacatatcagatgacgttcaggataaaaaagacgccggtttcaacatctctttggcggatgtttggggccgtgctcttgcgtacaatttttggccaagcttacaccgtggtggtgtagggtacacatggtcaactttaagggaagctgatgtcttcaagaatggagaaatgcccttccctatcactgttgcagacggtagatacccaggtaccaccgtgataaacttgaatgccactcttttcgaatttaatccctttgaaatgggttcatgggaccccactttgaacgcatttacggatgtgaagtatttaggtaccaacgttacaaacggtaaaccagttaataaaggccaatgcattgccgggtttgataacactggtttcataacagccacttcatctacgttgtttaaccaatttttactaagattgaattctaccgatttaccttcatttattgctaacttagccaccgatttcctggaagatttatccgacaatagtgacgatattgcaatttacgccccaaatccattcaaggaagctaattttcttcaaaagaacgcaacctccagtattatcgaatcagaatatctatttttggttgatggtggtgaagataaccaaaatattcctttagttccattgttgcaaaaggaacgtgaactagatgttatttttgcattagacaattctgctgatactgacgactattggccagatggtgcttcattagttaacacttatcagcgtcaatttggcagccaaggtctcaatttgtctttcccatatgttccagatgtgaacacatttgtcaacttggggttgaacaaaaagccaaccttttttggttgtgatgcaagaaatttgacagacttggagtacattccaccattaattgtttacattccaaattcaagacattcatttaatggtaaccaaagtacttttaagatgtcatactccgattcagaacgtcttggtatgattaagaatgggtttgaagctgccacaatgggtaattttactgatgattctgatttcttgggctgtgttggttgcgccattatcagacgtaagcaacaaaacttgaatgctacattgccctctgaatgcagccagtgttttaccaactactgctggaacggtactattgacagcaggtcagtctcaggtgtaggaaatgatgattattcttcttctgcttccttgtctgcctccgccgctgctgcctctgcctctgcctctgcctctgcttccgcctctgcctctgcttctgggtcttccactcataagaaaaatgcgggcaatgctttggtgaattattctaacttaaacactaacacttttattggtgtcttaagtgtcattagtgccgtcttcggtctaatttag

SEQ ID NO: 149 - DNA, 2121 bp, Saccharomyces cerevisiae S288c
atgcaattacggaacatattacaggctagctcgctaatttctggactttcgctcgctgcagattcgtcgtccactactggtgatggttatgctccatcaataattccttgtcccagtgatgatacctctttagttagaaacgcgtctggcttatctaccgctgaaactgattggttaaagaaaagagatgcgtacactaaagaagctttacattccttcttaagcagagctacttctaacttcagtgacacttctttgctatccactcttttcagtagtaactcttccaatgtacccaaaattggtattgcatgctctggtggtggttatcgtgccatgttgggtggtgctggtatgattgctgctatggacaatcgtactgatggtgctaacgagcatggtcttggtggtttactacaaagttccacgtatctatcgggtttgtccggtggtaactggttgactggtactttggcatggaacaattggacctctgtacaggaaattgtagaccatatgagtgagagcgattccatctggaatatcacgaaatccattgtgaaccctggtggctctaatttgacctacacaattgaaagatgggagtccattgtacaagaagtgcaggctaagtctgatgcaggcttcaatatatctttgtcggatttgtgggcccgtgcactttcttacaacttctttccaagcttgccagatgctggctccgctttgacttggtcctctttgagagatgttgatgtgttcaaaaacggtgaaatgcctttaccaattactgttgcagatggtagatacccaggtaccaccgtgataaacttgaatgccactcttttcgagttcactccatttgaaatgggttcttgggatccttctttgaacgcttttacggatgtgaaatatctaggtaccaacgttacaaatggtaaaccggtcaacaaggatcaatgcgtttctggttacgataatgctggatttgtaattgccacatccgccagtttattcaacgaattttccctggaagcttccacttcgacctattataaaatgattaatagttttgccaacaagtacgttaacaacctatcccaagatgacgatgatattgcaatttacgctgcaaatccattcaaggatacagaatttgttgaccgcaattacacttccagtattgttgatgccgatgatttgtttttagttgatggtggtgaggacggccaaaatttgccgttggttccactaatcaagaaggaacgtgacttggatgtggtgttcgcattggatatatccgacaatactgatgaatcatggccaagtggtgtgtgcatgacgaacacttatgagcgccagtattctaagcaaggtaaaggaatggctttcccatatgttccagacgttaacaccttccttaacttgggcttaactaataagccaacgttttttggttgtgatgcaaaaaatttgacggacttggagtatattccacctttagttgtatatatcccaaacacaaaacattcattcaatggtaaccaaagtactttgaagatgaactacaatgttacagaacgtcttggaatgatcagaaatggttttgaagctgctacaatgggcaactttacggatgactctaactttttaggttgcataggttgtgccatcattagacgtaagcaagaaagcctaaatgccaccttgccccctgaatgtaccaaatgttttgcggattactgctggaacggcacactaagtacctcagctaatcctgaactatcgggaaatagtacgtatcaaagcggtgctattgcctctgcaatctctgaggctactgacggtattccaataacggctctcttaggttcatcaacctccggaaatactacatcaaactcaacaacctcgacttcatcaaatgtcacttctaactcaaactcttcgtcaaatacaactttaaactcaaattcttcatcctcttcaatttcttcctctacagctcgttcttcttcctctacggcaaacaaagcgaatgctgcggctatttcctatgcgaacactaatactctaatgagtttgttaggtgccataacagcattatttggactaatttag

SEQ ID NO: 150 - DNA, 636 bp, Acinetobacter sp. ADP1
atgcaactgtataacatgtttttagacgggaaatgggcaaaatggttcttgattggttcatttagcgtaataccttttacagtttcggcaaaaaccattcttatcttaggcgacagtctgagtgcgggttatggcattaaccccgaacagggctgggtcgctttattacaaaaacgtctggatcaacaatttcccaagcagcataaagtcattaatgccagtgtaagtggggaaaccaccagtggtgctttagctcgtttacccaaactacttactacttatcgacctaatgtggtggtcattgagcttggtggtaatgatgcattaagaggacaaccgcctcaaatgattcaaagtaatctggaaaaattaatccagcacagccaaaaggcaaaatctaaagtcgtggtgtttggaatgaaaataccaccaaattatggcactgcctatagtcaggcatttgaaaataattataaggtagtgagtcaaacatatcaggttaagttgttgccattttttcttgatggtgtggctggacacaaaagtctaatgcaaaatgaccagatccatccaaatgccaaagcccagtcaatcttgctaaataacgcatacccatatattaaaggcgctttataa

SEQ ID NO: 151 - DNA, 1029 bp, Acinetobacter sp. ADP1
atgtcagatatcccgtttctgaatccgacaatactacaacagcttgatttacctgtacctagtcgtgatcaaacccctttagtgttgcctcagttaaatctcaatcattcttttgagccttcacgtgatttattggcctatcgaaagttatatggtttagatctactggctggtgattactggcaaggctatattcagatgcccttgtttcgtttacatgtacaagtttttacgccagaaagagaaattccattaggaacggtgtgcttattacatggctatcttgaacatagtggtatttatcaaccgatcatccgtgaaatactggatcaaggttttagtgtggtcacttatgatctgcctggacatggattaagtgatggatcacccgctaatattcagaattttgatcattatcaacaggttttaatggcggtttaccagtatgttaaaaatgcagatcagttgcctaaaccttggttaggaattggtcaaagtacaggtggcgcaatctggatgcatcatttgttggaatatgcagagaaacgacaagatccgattgttgatcgggtattactattgtcaccactcatacgcccagcaaaaacggcatggtggcataattctgtgggtttaggcattattcgaagaattcgtcgtcaagttccaagacattttagacgtaataatcataatcctgagtttttacgttttatccgtcttaaagatccgttacaaccacgcatgatgggaatggactggatacttgcgatgtcaaaatggatgtttgaaatggaacagcgaccagcctgtcgtataccagtatggcttgcacaaggggcattagatcagactgtagattggcgttataacattgaatttattcgacgtaaatttcgcttacaaaccttgttgatgttagaagaaggatctcatcaactcatcaatgagcgcgctgatattcgtgctgctttgacaggacttattccagcatttttacatgctcgtccaaaacatcattattattaa

SEQ ID NO: 152 - DNA, 840 bp, Rhodococcus jostii RHA1
atgcagcatcgagaatcatccttcgccggcgtcggcggaattcccatcgtctacgacgtgtggctccccgagcggcgcccgcgcggcgtgctggttctgtgccacggcttcggcgagcatgcccggcggtacgaccatgtgatcgaacggctcggggaactcgacctcgcgatctacgcgcccgaccaccgtgggcacgggcggtcgggcggcaaacgggtccatctgaaggactggaccgagttcaccgacgacctgcaccagttgttcggcatcgcgtcgacggactggcccggcaccgaccggtttctcctcgggcacagcatgggcggttccatcgcgctgacctacgcactcgaccaccagcaggacctgaaggcactcatgctgtccgggcctgcggtcgacgtgacgagcggcacgccgcgcatcgtggtggagatcggcaagctggtgggtcgcttccttcccggagtgcccgtcgagtcgctcgacgcgaagttggtctcccgcgatcctgcggtcgtgtcggcctacgaggaggatcccctcgtccaccacgggaaggtgcctgccgggattgcgcgcgggatgatcctcgccgccgaacggttgccggaacgtctgccgtcgctgacgattcccctgcttctccagcacggccaggacgacggactcgcgagtgtgcacggcacggaactgatcgcggagtacgtcggttcggaggatctcacggtggagatctacgaaaacctgttccacgaggtgttcaacgaaccggagaacgaggaggtactcgacgacctcgtcgagtggttgcggccgcgcgtgcaggcctga

SEQ ID NO: 153 - DNA, 2546 bp, Artificial Sequence
  Codon optimized SDP1
catatggacatcagtaatgaggcaagcgttgacccctttagtattgggccgtcttcgatcatgggccgaaccatcgcttttcgagttctcttctgtcgcagcatgagtcaactgcgccgggatttgttccgctttttgctccactggtttctgcgctttaaactgacggtgagtccattcgtctcctggttccacccgcgcaatccacaaggcattctcgcggttgtcaccatcattgcctttgtcttgaaacgctatacgaatgtgaagatcaaagccgagatggcgtaccgtcggaagttttggcggaacatgatgcggacagcattgacttacgaagagtgggcccatgcagctaaaatgctggagaaggagacgccgaagatgaatgagagcgatctctatgacgaagaattggttaaaaacaaactgcaagagctgcggcatcgccgtcaagaaggatcgctgcgcgatatcatgttttgcatgcgagcggacctggtccgcaatctgggcaacatgtgtaacagtgagctgcataaagggcgactccaagtgccccgccacatcaaagaatatatcgatgaagttagtacccagctgcgcatggtttgcaattcggatagcgaggagctgagcttggaagagaaactctcgttcatgcacgaaacacgtcatgcgtttggtcgcactgctttgttgctgtccgggggtgcgtccctgggtgcattccatgtcggagtggtccgaacgctggtggagcacaagctgctgccccgaatcattgcgggctccagcgttggtagcatcatctgcgcagttgtcgcttcccggagttggccggagctgcagtcgttttttgaaaacagcctccatagtttgcagtttttcgatcagctcggaggagtgttctccatcgtgaagcgcgttatgacgcagggtgccctccatgacattcggcaattgcaatgtatgttgcgaaacctcacctcgaacctcactttccaggaggcttatgacatgacaggtcgaatcttgggaattaccgtgtgttcgcctcgcaagcacgaaccgccacgttgtctcaattacctgacctcgccccatgtcgtcatctggagtgccgtcacggcgagttgtgcgtttcctggcttgttcgaggcacaggagttgatggcgaaagaccgcagcggcgaaattgttccgtaccatcctccgtttaatctcgatccagaggtggggacgaaaagctcgagcggccggcgctggcgcgatgggagcctcgaagtcgatctgcccatgatgcagttgaaggaactctttaacgtcaatcacttcatcgtgagccaggccaatcctcatattgcacccctgctccgactcaaggatctggtgcgcgcatacggtggccgttttgccgcaaaattggctcatttggtcgagatggaagtgaaacaccggtgcaaccaggtgttggaactcggcttccccctgggcggcctcgccaaactgtttgcccaagaatgggaaggtgatgtcacggttgtcatgccggcgaccctggctcagtatagcaagatcattcaaaatccgacccatgtggaactccaaaaggccgccaatcaagggcgtcgttgcacttgggagaagctgtctgcgatcaagagtaactgcggtattgaactggccctggatgatagcgtggcgattctcaatcacatgcgccgcctgaagaagtccgccgaacgagccgccactgcgacctcgtccagccaccacggcttggcctccaccacgcgctttaatgcttcgcggcgcatccccagttggaatgtcctggcccgtgagaactctacgggttctctcgatgacctggtcactgacaacaatctccacgcgtccagtggtcgcaacctgtcggattctgaaacagagtcggtcgaactgtcgtcctggactcggacggggggcccactgatgcgcactgctagtgctaataagttcattgatttcgtgcagtctctcgatattgacatcgcattggtgcgtggtttttcgtcgagcccgaactcgcctgccgtgcctcctggcgggagcttcacacccagtccccggagcattgctgcgcattctgacattgagtctaactcgaacagcaataatctgggaacctccacatccagtattactgtgacagagggtgatctcctgcaacccgaacgtacctctaatggcttcgttctcaacgttgtgaaacgggaaaacttgggcatgcctagcattggcaaccaaaacaccgaactgccggaaagcgttcaactggacattcctgaaaaagagatggattgcagcagcgtgagcgagcatgaagaagacgacaatgataacgaggaagaacataacggaagttcgttggtcaccgtttcttcggaggacagtggtctgcaggaacccgtgtctgggtccgtgattgatgcttaggaagagcaaatcgataagctcttcgttactatccatacgatgttcccgattacgcttagagatct

SEQ ID NO: 154 - DNA, 1506 bp, Acinetobacter sp. ADP1
atgttaggcataaaaaagtcagatatgaatccttatcaagctcatcgcataaaaaaattaaaataccagcttgaaaatgccgaaagctatgaagagtggaaatctaccgcattgcaactcgatgaagaaacgggtttgcaagaatggaaatatgataactgttctgcctattttgatgctgagctgatctcataccgactcaatttattacgtaaatatcgcctgcaacagcgcgtcatggattctgtatatctgttacaggagggattaacgcatgatattgccaacattggacatccaatgctttttgcagccacttatgttggaaccaagcaaattatcgaggactatattgaggaagtatctttatcactcgcatttattgcggcaagtcaatgtcagaccttaacggtggcagagaaactcaaattctttaaaaattgtcaaaagacctatggacagccagcactcatgttttcaggtggtgctactttgggtttgtttcatagtggagtatgtaaaactctgatccagcaagatttgatgccgagagtgttatcaggctcaagtgctggtgcgattatggctggtatgcttggtacttcaactgcatcagaatttcagaaaattttattaggcgaaaacttttttagtgaggcttttcattttcgtggtgtcagagacctgcttaaaggaaatggcggttttgcggatgtgaaatatctgaaaaagtttttgattgaaaatctgggcgacttaaccttttcagaagcgtatgaaagatctggattgcatattaatgttgctgttgctccttatgatggctcgcaaaatgcaagaatcttaaatgcgtacactgcacctaatcttttggtctggagtgctgtgttggcttcatgtgcagtgcctgttttatttccgcctgtacgtctgaccagtaaaaaacgtgacggtagccatacgccttatatggccaatactaaatgggtagatggcagcgttagaagtgattttccacaggaaaaaatggcgcgtttatataatttgaattatacgattgccagtcaagtcaatccgcatgtggttccttttatgcagagcgatgcatcacgctatcgaaaggatattctgagttggccgcaacgtattttacgtcgtcaaggtaaagtgatttcattaggcatcatggattttacccgtgaacgattaggcaatgttccgccagtcagacgcttgcttgatcatggttatggcatagtggggcagaggtattatggtgacgtcaatatcattgcgccgttcaatctgcggcagtatgcatatatgctgcaaaaccctcgaccacacttatttaagttacttcaacagcagggagagcgtgccacatggccaaaaatttctgccattgaaacacatgctcggattggtaaaacgattcagcactgtatcgaggtactggattatcaaaaaaatcgatatatacaagctgaaaaagccagtgcttaa

SEQ ID NO: 155 - DNA, 1413 bp, Rhodococcus jostii RHA1
atgatcggatcgagagcacgacgacgtcgaatgctgctggtgggagcgatggtggtgggcgcacagctcgccgtcgccgcgccgtcggtcggggctcccgccgacgacggaacgccggtggacgtgcagccggctactaccgtccccgcctggcccgaggccgaccgggggttctacgaaccaccggcggacgtggtcgcggcggccgagccgggcgaaatcatcgccgcccgcgaagtgcacctggcgaacctgtcggtgcttccggtgaacgtcgacgcgtggcagctgtcgtatcgctccaccaactcgcgggacgagccgatcccggcggtcgcgacggtcgtcaagccgcggggcacgatcgacggcgtccgcaatctgctctcgctccagccggaggaagactccctcggcaagtactgcgccgcttcgtacgcactgcagcagtggtccgtgcccgcgccgctgaccggtcagatcgtcgcgccgctgcagttcctcgaggcgcaggccgccctcgcccagggatgggccgtcgtgatgccggatcaccagggcccgaacgccgcgtatgcggccgggcccctcgcgggccgcatcaccctggacgggatccgggcggcggagaacttcggcccactgggcctgacaggcaggcagactccggtcgggttgatgggctattccggaggcgcgatcgcgacgggtcacgccgccgaactccacgcgagctacgcaccggacctgaacatcgtcggtgcggccgaaggcggcatcccggccgatctcggcgccctcgtcgatctcgccgacaacaacctgggcgcgggaatcgtgctgggcggcgtgttcggcgtgagccgtgattatcccgagctcgcggagtatctcgacacacatctgaatccactcggcaagcagctcctgaccgccaagagcaacctctgcgtgagctaccagtcggcgctcctgccgttcgcgaacctgcggggcctgttcgacagcccgagcggtgacccgctgcgcgatccggtggtcgagtcggtactcgaccggacgaagatgggtcaccgggtcccggacgtcccgatgttcatgtaccaggcgaacccggactggctggtgccggtcgggcccgtcgacacactcgtcgacacctactgccaggacccggacgcccgggtgacctacacccgcgaccacgccagcgagcacctgtccctcgaaccggtcgcggcggcgagcgccctgatgtggctgcgggaccggttcgccggggtcccggccgagaccggatgcagcacccacgacgtcggatcgatggccctcgaccaggcgacgtggccggtgtggtcgtcgatcgtcggcgacacgatcacgagcctgctcggtcagccgatcggcacgtga

SEQ ID NO: 156 - DNA, 990 bp, Rhodococcus sp.
atgagcactgcgacttacgaattctgcccgtcacccctcccggtgacgcggcgggagttcgccggagccagcctgcagtcgacggccctcgcccacacactccgacgcacggtccggccgttcctggacgggtgggcgcgctaccccgaactgccgtggcccacgggagtcgtcgacctgttcgggtactcgctcggtcccatccgcggaaccgtgcgcaggcccatccggctgccgcactgccgcgccgaatggatccggccgccgggtgagctcggcgaccgggcgatcctctacctccacggcggggcgttcctgtgctgcgggatcaactcccaccgccagatggtgtcccggatctcggcggagtcgcaggcgtcgacgctgaacgtcgcgtaccggatgatcccgcggaatcccatccgggcggccgtcgaggacggtgtcgacgggtaccggtggctgctctcgcacggctacaccgcagaccggatcgtcatcgccggcgactcggcgggcgggttcctgacgttcatggtgacgctcgaagcgctgcgccaggggttgccgcgtcccgccgccgacgtcgcgctgtcgccgctgaccgacctcgatccggtgaacaagctggcccatcccaacgccgacctctgcgctgtcttccccaaacgcgcggtcggtgccctgtccaggctgatcgaaaggctggacaccaggggcgggcacgagccgtccacgtcacccgtggacggctccctcgccgccatgccgccggcgctgatccagaccggctcgcaggaaatggtctacgtcgacgcggaactgatgtccgagcggctgtcccaggcgggtgtgccgtgcgaactgcaggtgtgggaacggcaggtgcacgtcttccaggccgccgccggactgctccccgagggcacccgcgccatccgcgagatcggccggttcatccgcaaggccacacccgtgagtacttcttaa

SEQ ID NO: 157 - protein, 386 aa, Acinetobacter sp ADP1
MAFRFIEGIPTSLGVFGVVGSLCMSHAHAIEAVQTSATITPTSPAACIGLESNSDRLACYDALFKVADTAKTTPVIEQKAALNPSPSVEQSELNPQSIKEKIGNLFAIEGPRIDPNTSLLDRRWELSEKSKLGTWNIRGYKPVYLLPIFWTSKKNEFPSSPNPENTVHENQNLTSAESKFQLSLKTKAWENIFGNNGDLWLGYTQSSRWQVYNADESRPFRETNYEPEASLIFRTNYEFLGLNGRLLGVTLNHQSNGRSDPLSRSWNRVIFNIGLERDNFALVLRPWIRIQEEAKNDNNPDIEDYVGRGDLTAFYRWKDNDFSLMLRHSLKDGDKSHGAVQFDWAFPISGKLRGNFQLFNGYGESLIDYNHRATYVGLGVSLMNWY

SEQ ID NO: 158 - protein, 289 aa, Escherichia coli
MRTLQGWLLPVFMLPMAVYAQEATVKEVHDAPAVRGSIIANMLQEHDNPFTLYPYDTNYLIYTQTSDLNKEAIASYDWAENARKDEVKFQLSLAFPLWRGILGPNSVLGASYTQKSWWQLSNSEESSPFRETNYEPQLFLGFATDYRFAGWTLRDVEMGYNHDSNGRSDPTSRSWNRLYTRLMAENGNWLVEVKPWYVVGNTDDNPDITKYMGYYQLKIGYHLGDAVLSAKGQYNWNTGYGGAELGLSYPITKHVRLYTQVYSGYGESLIDYNFNQTRVGVGVMLNDLF

SEQ ID NO: 159 - protein, 395 aa, Streptomyces coelicolor A3(2)
MTVVEPTPGADRVSIQRLRRRLERLIGVAATEGNELVALRNGDEIFPAMLGAIRAAEHTIDMMTFVYWRGQIARDFAAALADRARSGVRVRLLLDGFGAKEIEQDLLDAMEAAGVQIAWFRKPLWLSPFKQNHRCHRKALVIDEHTAFTGGVGIAEEWCGDARGPGEWRDTHVQVRGPAVDGVAAAFAQNWAECHDELYDDRDRFSDHTQPGTSIVQVVRGSASFGWQDMQTLIRVMLTSAEHRFRLATAYFAPDTYFIDLLCATARRGVTVEILLPGPHTDQRACQLAGQYHYTRLLDAGVSIREYQPTMMHAKIITVDGLAALIGSTNFNRRSMDHDEEIMLAVLDQEFTNGLDRDFDADLERSTAIEPTRWKRRATLRRLRETAVLPLRRFL

SEQ ID NO: 160 - protein, 148 aa, Arabidopsis thaliana
MAAPIILFSFLLFFSVSVSALNVGVQLIHPSISLTKECSRKCESEFCSVPPFLRYGKYCGLLYSGCPGERPCDGLDSCCMKHDACVQSKNNDYLSQECSQKFINCMNNFSQKKQPTFKGNKCDADEVIDVISIVMEAALIAGKVLKKP

SEQ ID NO: 161 - protein, 357 aa, Arabidopsis thaliana
MEYQGLQNWDGLLDPLDDNLRREILRYGQFVESAYQAFDFDPSSPTYGTCRFPRSTLLERSGLPNSGYRLTKNLRATSGINLPRWIEKAPSWMATQSSWIGYVAVCQDKEEISRLGRRDVVISFRGTATCLEWLENLRATLTHLPNGPTGANLNGSNSGPMVESGFLSLYTSGVHSLRDMVREEIARLLQSYGDEPLSVTITGHSLGAAIATLAAYDIKTTFKRAPMVTVISFGGPRVGNRCFRKLLEKQGTKVLRIVNSDDVITKVPGVVLENREQDNVKMTASIMPSWIQRRVEETPWVYAEIGKELRLSSRDSPHLSSINVATCHELKTYLHLVDGFVSSTCPFRETARRVLHR

SEQ ID NO: 162 - protein, 471 aa, Arabidopsis thaliana
MAAKVFTQNPIYSQSLVRDKTPQQKHNLDHFSISQHTSKRLVVSSSTMSPPISSSPLSLPSSSSSQAIPPSRAPAVTLPLSRVWREIQGSNNWENLIEPLSPILQQEITRYGNLLSASYKGFDLNPNSKRYLSCKYGKKNLLKESGIHDPDGYQVTKYIYATPDINLNPIKNEPNRARWIGYVAVSSDESVKRLGRRDILVTFRGTVTNHEWLANLKSSLTPARLDPHNPRPDVKVESGFLGLYTSGESESKFGLESCREQLLSEISRLMNKHKGEEISITLAGHSMGSSLAQLLAYDIAELGMNQRRDEKPVPVTVFSFAGPRVGNLGFKKRCEELGVKVLRITNVNDPITKLPGFLFNENFRSLGGVYELPWSCSCYTHVGVELTLDFFDVQNISCVHDLETYITLVNRPRCSKLAVNEDNFGGEFLNRTSELMFSKGRRQALHFTNAATNAAYLLCSISNHMLYYNIF

SEQ ID NO: 163 - protein, 410 aa, Arabidopsis thaliana
SPSKKNKPPSCGSLVTILSLDGGGVRGIIAGVILAFLEKQLQELDGEEARLADYFDVIAGTSTGGLVTAMLTVPDETGRPHFAAKDIVPFYLEHCPKIFPQPTGVLALLPKLPKLLSGPKYSGKYLRNLLSKLLGETRLHQTLTNIVIPTFDIKKLQPTIFSSYQLLVDPSLDVKVSDICIGTSAAPTFFPPHYFSNEDSQGNKTEFNLVDGAVTANNPTLVAMTAVSKQIVKNNPDMGKLKPLGFDRFLVISIGTGSTKREEKYSAKKAAKWGIISWLYDDGSTPILDITMESSRDMIHYHSSVVFKALQSEDKYLRIDDDTLEGDVSTMDLATKSNLENLQKIGEKMLTNRVMQMNIDTGVYEPVAENITNDEQLKRYAKILSDERKLRRLRSDTMIKDSSNESQEIK

SEQ ID NO: 164 - protein, 686 aa, Anabaena variabilis ATCC 29413
MINLANTQTVLKFDGIDDYIDFGKNDIGGVFAQGSSCFTVSGWINPHKLTEKSTSYGTRNVFFARSSDRYSDNFEFGISETGSLDIFIDETISKGIRTFGNGELTIGQWHFFAIVFNSGQITVYLDDHEYNDSLRGSSLNKATSSVTLGATLHKQVYFTGQLANISVWNYPCTQVQIKTHHCGLIVGDEPGLVAYWKLDEGQGTTVKNKAGKSYQGNFRGNPSWDLAQIPFAAPLSSQDDIQEDVQFEIGIIAETSISTLTTDLLAATVPLVSNNEDQTIEIQYPEINSEKSEIIANLINLPSHEEASKTDQTEVLVNSQQLQTFIQAESPETMNTKSRPRYKILSIDGGGIRGIIPALLLAEIERRTQEPIFSLFDLIAGTSSGGILALGLTKPRLNSSEELPLAEYTAEDLVQLFLEYGVEIFYEPLFERLLGPLEDIFLQPKYPSTSKEEILRQYLGKTPLVNNLKEVFVTSYDIEQRIPVFFTNQLEKQQIESKNSHNLCGNVSLLDAALATSATPTYFAPHRIVSPENSAIAYTLIDGGVFANNPAHLAILEAQISSKRKAQTVLNQEDILVVSLGTGSPTSAYPYKEVKNWGLLQWGRPLLNIVFDGGSGVVSGELEQLFEPSDKEAKSFYYRFQTLLDAELEAIDNTKLQNTRQLQAIAHKLISEKSQQIDELCELLLG

SEQ ID NO: 165 - protein, 664 aa, Saccharomyces cerevisiae S288c
MKLQSLLVSAAVLTSLTENVNAWSPNNSYVPANVTCDDDINLVREASGLSDNETEWLKKRDAYTKEALHSFLNRATSNFSDTSLLSTLFGSNSSNMPKIAVACSGGGYRAMLSGAGMLAAMDNRTDGANEHGLGGLLQGATYLAGLSGGNWLTSTLAWNNWTSVQAIVDNTTESNSIWDISHSILTPDGINIFKTGSRWDDISDDVQDKKDAGFNISLADVWGRALAYNFWPSLHRGGVGYTWSTLREADVFKNGEMPFPITVADGRYPGTTVINLNATLFEFNPFEMGSWDPTLNAFTDVKYLGTNVTNGKPVNKGQCIAGFDNTGFITATSSTLFNQFLLRLNSTDLPSFIANLATDFLEDLSDNSDDIAIYAPNPFKEANFLQKNATSSIIESEYLFLVDGGEDNQNIPLVPLLQKERELDVIFALDNSADTDDYWPDGASLVNTYQRQFGSQGLNLSFPYVPDVNTFVNLGLNKKPTFFGCDARNLTDLEYIPPLIVYIPNSRHSFNGNQSTFKMSYSDSERLGMIKNGFEAATMGNFTDDSDFLGCVGCAIIRRKQQNLNATLPSECSQCFTNYCWNGTIDSRSVSGVGNDDYSSSASLSASAAAASASASASASASASASGSSTHKKNAGNALVNYSNLNTNTFIGVLSVISAVFGLI

SEQ ID NO: 166 - protein, 706 aa, Saccharomyces cerevisiae S288c
MQLRNILQASSLISGLSLAADSSSTTGDGYAPSIIPCPSDDTSLVRNASGLSTAETDWLKKRDAYTKEALHSFLSRATSNFSDTSLLSTLFSSNSSNVPKIGIACSGGGYRAMLGGAGMIAAMDNRTDGANEHGLGGLLQSSTYLSGLSGGNWLTGTLAWNNWTSVQEIVDHMSESDSIWNITKSIVNPGGSNLTYTIERWESIVQEVQAKSDAGFNISLSDLWARALSYNFFPSLPDAGSALTWSSLRDVDVFKNGEMPLPITVADGRYPGTTVINLNATLFEFTPFEMGSWDPSLNAFTDVKYLGTNVTNGKPVNKDQCVSGYDNAGFVIATSASLFNEFSLEASTSTYYKMINSFANKYVNNLSQDDDDIAIYAANPFKDTEFVDRNYTSSIVDADDLFLVDGGEDGQNLPLVPLIKKERDLDVVFALDISDNTDESWPSGVCMTNTYERQYSKQGKGMAFPYVPDVNTFLNLGLTNKPTFFGCDAKNLTDLEYIPPLVVYIPNTKHSFNGNQSTLKMNYNVTERLGMIRNGFEAATMGNFTDDSNFLGCIGCAIIRRKQESLNATLPPECTKCFADYCWNGTLSTSANPELSGNSTYQSGAIASAISEATDGIPITALLGSSTSGNTTSNSTTSTSSNVTSNSNSSSNTTLNSNSSSSSISSSTARSSSSTANKANAAAISYANTNTLMSLLGAITALFGLI

SEQ ID NO: 167 - protein, 211 aa, Acinetobacter sp. ADP1
MQLYNMFLDGKWAKWFLIGSFSVIPFTVSAKTILILGDSLSAGYGINPEQGWVALLQKRLDQQFPKQHKVINASVSGETTSGALARLPKLLTTYRPNVVVIELGGNDALRGQPPQMIQSNLEKLIQHSQKAKSKVVVFGMKIPPNYGTAYSQAFENNYKVVSQTYQVKLLPFFLDGVAGHKSLMQNDQIHPNAKAQSILLNNAYPYIKGAL

SEQ ID NO: 168 - protein, 342 aa, Acinetobacter sp. ADP1
MSDIPFLNPTILQQLDLPVPSRDQTPLVLPQLNLNHSFEPSRDLLAYRKLYGLDLLAGDYWQGYIQMPLFRLHVQVFTPEREIPLGTVCLLHGYLEHSGIYQPIIREILDQGFSVVTYDLPGHGLSDGSPANIQNFDHYQQVLMAVYQYVKNADQLPKPWLGIGQSTGGAIWMHHLLEYAEKRQDPIVDRVLLLSPLIRPAKTAWWHNSVGLGIIRRIRRQVPRHFRRNNHNPEFLRFIRLKDPLQPRMMGMDWILAMSKWMFEMEQRPACRIPVWLAQGALDQTVDWRYNIEFIRRKFRLQTLLMLEEGSHQLINERADIRAALTGLIPAFLHARPKHHYY

SEQ ID NO: 169 - protein, 279 aa, Rhodococcus jostii RHA1
MQHRESSFAGVGGIPIVYDVWLPERRPRGVLVLCHGFGEHARRYDHVIERLGELDLAIYAPDHRGHGRSGGKRVHLKDWTEFTDDLHQLFGIASTDWPGTDRFLLGHSMGGSIALTYALDHQQDLKALMLSGPAVDVTSGTPRIVVEIGKLVGRFLPGVPVESLDAKLVSRDPAVVSAYEEDPLVHHGKVPAGIARGMILAAERLPERLPSLTIPLLLQHGQDDGLASVHGTELIAEYVGSEDLTVEIYENLFHEVFNEPENEEVLDDLVEWLRPRVQA

SEQ ID NO: 170 - protein, 825 aa, Arabidopsis thaliana
MDISNEASVDPFSIGPSSIMGRTIAFRVLFCRSMSQLRRDLFRFLLHWFLRFKLTVSPFVSWFHPRNPQGILAVVTIIAFVLKRYTNVKIKAEMAYRRKFWRNMMRTALTYEEWAHAAKMLEKETPKMNESDLYDEELVKNKLQELRHRRQEGSLRDIMFCMRADLVRNLGNMCNSELHKGRLQVPRHIKEYIDEVSTQLRMVCNSDSEELSLEEKLSFMHETRHAFGRTALLLSGGASLGAFHVGVVRTLVEHKLLPRIIAGSSVGSIICAVVASRSWPELQSFFENSLHSLQFFDQLGGVFSIVKRVMTQGALHDIRQLQCMLRNLTSNLTFQEAYDMTGRILGITVCSPRKHEPPRCLNYLTSPHVVIWSAVTASCAFPGLFEAQELMAKDRSGEIVPYHPPFNLDPEVGTKSSSGRRWRDGSLEVDLPMMQLKELFNVNHFIVSQANPHIAPLLRLKDLVRAYGGRFAAKLAHLVEMEVKHRCNQVLELGFPLGGLAKLFAQEWEGDVTVVMPATLAQYSKIIQNPTHVELQKAANQGRRCTWEKLSAIKSNCGIELALDDSVAILNHMRRLKKSAERAATATSSSHHGLASTTRFNASRRIPSWNVLARENSTGSLDDLVTDNNLHASSGRNLSDSETESVELSSWTRTGGPLMRTASANKFIDFVQSLDIDIALVRGFSSSPNSPAVPPGGSFTPSPRSIAAHSDIESNSNSNNLGTSTSSITVTEGDLLQPERTSNGFVLNVVKRENLGMPSIGNQNTELPESVQLDIPEKEMDCSSVSEHEEDDNDNEEEHNGSSLVTVSSEDSGLQEPVSGSVIDA

SEQ ID NO: 171 - protein, 501 aa, Acinetobacter sp. ADP1
MLGIKKSDMNPYQAHRIKKLKYQLENAESYEEWKSTALQLDEETGLQEWKYDNCSAYFDAELISYRLNLLRKYRLQQRVMDSVYLLQEGLTHDIANIGHPMLFAATYVGTKQIIEDYIEEVSLSLAFIAASQCQTLTVAEKLKFFKNCQKTYGQPALMFSGGATLGLFHSGVCKTLIQQDLMPRVLSGSSAGAIMAGMLGTSTASEFQKILLGENFFSEAFHFRGVRDLLKGNGGFADVKYLKKFLIENLGDLTFSEAYERSGLHINVAVAPYDGSQNARILNAYTAPNLLVWSAVLASCAVPVLFPPVRLTSKKRDGSHTPYMANTKWVDGSVRSDFPQEKMARLYNLNYTIASQVNPHVVPFMQSDASRYRKDILSWPQRILRRQGKVISLGIMDFTRERLGNVPPVRRLLDHGYGIVGQRYYGDVNIIAPFNLRQYAYMLQNPRPHLFKLLQQQGERATWPKISAIETHARIGKTIQHCIEVLDYQKNRYIQAEKASA

SEQ ID NO: 172 - protein, 910 aa, Saccharomyces cerevisiae S288c
MSSKISDLTSTQNKPLLVTQQLIEKYYEQILGTSQNIIPILNPKNKFIRPSKDNSDVERVEEDAGKRLQTGKNKTTNKVNFNLDTGNEDKLDDDQETVTENENNDIEMVETDEGEDERQGSSLASKCKSFLYNVFVGNYERDILIDKVCSQKQHAMSFEEWCSAGARLDDLTGKTEWKQKLESPLYDYKLIKDLTSRMREERLNRNYAQLLYIIRTNWVRNLGNMGNVNLYRHSHVGTKYLIDEYMMESRLALESLMESDLDDSYLLGILQQTRRNIGRTALVLSGGGTFGLFHIGVLGTLFELDLLPRVISGSSAGAIVASILSVHHKEEIPVLLNHILDKEFNIFKDDKQKSESENLLIKISRFFKNGTWFDNKHLVNTMIEFLGDLTFREAYNRTGKILNITVSPASLFEQPRLLNNLTAPNVLIWSAVCASCSLPGIFPSSPLYEKDPKTGERKPWTGSSSVKFVDGSVDNDLPISRLSEMFNVDHIIACQVNIHVFPFLKLSLSCVGGEIEDEFSARLKQNLSSIYNFMANEAIHILEIGSEMGIAKNALTKLRSVLSQQYSGDITILPDMCMLFRIKELLSNPTKEFLLREITNGAKATWPKVSIIQNHCGQEFALDKAISYIKGRMIVTSSLKTPFQFADSVIGLIKAPEQTSDESKNPENSTLLTRTPTKGDNHISNVLDDNLLESESTNSLLLLRENASTYGRSPSGFRPRYSITSASLNPRHQRRKSDTISTSRRPAKSFSFSVASPTSRMLRQSSKINGHPPPILQKKTSMGRLMFPMDAKTYDPESHELIPHSASIETPAMVDKKLHFGRKSRYLRHMNKKWVSSSNILYTDSDKEDHPTLRLISNFDSDAMIHSDLAGNFRRHSIDGRPPSQATKSSPFRSRPSSSTQHKSTTSFTQ

SEQ ID NO: 173 - protein, 470 aa, Rhodococcus jostii RHA1
MIGSRARRRRMLLVGAMVVGAQLAVAAPSVGAPADDGTPVDVQPATTVPAWPEADRGFYEPPADVVAAAEPGEIIAAREVHLANLSVLPVNVDAWQLSYRSTNSRDEPIPAVATVVKPRGTIDGVRNLLSLQPEEDSLGKYCAASYALQQWSVPAPLTGQIVAPLQFLEAQAALAQGWAVVMPDHQGPNAAYAAGPLAGRITLDGIRAAENFGPLGLTGRQTPVGLMGYSGGAIATGHAAELHASYAPDLNIVGAAEGGIPADLGALVDLADNNLGAGIVLGGVFGVSRDYPELAEYLDTHLNPLGKQLLTAKSNLCVSYQSALLPFANLRGLFDSPSGDPLRDPVVESVLDRTKMGHRVPDVPMFMYQANPDWLVPVGPVDTLVDTYCQDPDARVTYTRDHASEHLSLEPVAAASALMWLRDRFAGVPAETGCSTHDVGSMALDQATWPVWSSIVGDTITSLLGQPIGT

SEQ ID NO: 174 - protein, 329 aa, Rhodococcus sp.
MSTATYEFCPSPLPVTRREFAGASLQSTALAHTLRRTVRPFLDGWARYPELPWPTGVVDLFGYSLGPIRGTVRRPIRLPHCRAEWIRPPGELGDRAILYLHGGAFLCCGINSHRQMVSRISAESQASTLNVAYRMIPRNPIRAAVEDGVDGYRWLLSHGYTADRIVIAGDSAGGFLTFMVTLEALRQGLPRPAADVALSPLTDLDPVNKLAHPNADLCAVFPKRAVGALSRLIERLDTRGGHEPSTSPVDGSLAAMPPALIQTGSQEMVYVDAELMSERLSQAGVPCELQVWERQVHVFQAAAGLLPEGTRAIREIGRFIRKATPVSTS

SEQ ID NO: 175 - DNA, 2733 bp, Saccharomyces cerevisiae S288c
atgagcagcaaaatatcagatcttacatctacacaaaataagcccctccttgttacgcaacaactaatcgaaaaatattacgaacagatcctgggcacttcccagaacataattcctattttaaatccgaagaacaagtttattaggcccagtaaggataattcagatgttgaaagggtggaggaggatgctggtaaaagactgcaaactggcaagaacaaaactacgaacaaagtaaatttcaacctggatactggaaacgaggataaacttgacgatgaccaagagacagtaacagaaaatgaaaataatgatatcgagatggttgagacagacgaaggcgaagatgaaaggcaagggtcatctttagccagtaaatgcaaatcatttctttacaacgtttttgtgggaaactatgaaagagacattcttattgacaaagtctgttcacaaaagcaacatgcgatgtcatttgaagaatggtgttctgcgggcgccagattggatgacctcactgggaaaacagaatggaagcagaaattggaaagtcccttgtatgattacaagctaataaaagatttaacatctagaatgcgtgaggagcgcttgaataggaattacgctcaattgttgtacatcattaggacgaattgggtacgaaacctgggaaatatggggaatgtaaacctatataggcactcccatgtaggcaccaaatatttaattgacgagtatatgatggagtctaggttagcgctagaatctttaatggagtctgatcttgatgatagttaccttttgggtatactgcaacaaacgagaagaaatattggtcgtaccgctttagttctcagtgggggtggaacttttggtcttttccacatcggtgtccttggtactctatttgaattggatttattacccagagtgattagtggtagcagtgctggtgcaattgtagcaagcatattatctgtccatcacaaagaagaaattccggttttactaaatcatattttggataaagaattcaacattttcaaagacgataaacagaaaagtgaaagcgagaatttgttaataaaaatatctaggttcttcaaaaacggtacgtggtttgataacaagcatctggtaaatacaatgatagaatttttgggagatttgacatttagggaagcttacaatagaacgggtaaaattttgaatataaccgtttcgccggcatctttatttgaacaaccgcgcttgctgaataatttgactgcaccaaacgtcctgatttggtccgccgtatgtgcatcatgttcactaccgggaattttcccctcgagcccactttacgaaaaagatccaaaaacgggagaaaggaaaccatggactggtagtagttcggtcaaatttgtcgatggttctgtggacaatgacttgcccatttctcgtctttctgaaatgtttaatgtagaccatattatcgcatgccaggtgaatattcacgtatttccctttttgaaactatcactatcctgtgttggcggggaaattgaggacgaatttagtgcaagattaaagcaaaacttatcaagtatatacaattttatggccaatgaagctattcatattctagaaattggaagtgagatgggaattgccaaaaacgcgcttacaaaactgagatcggtattatctcaacaatattctggtgacatcactattttgcccgacatgtgtatgctttttagaataaaggagctgttgtcaaacccaacaaaagaatttttattaagggaaatcaccaatggtgcaaaagctacgtggcccaaggtttccattattcaaaatcactgtggccaggaatttgctctggataaggcgatttcttatatcaaaggtaggatgattgtcacctcctctttaaaaacccccttccaatttgctgattcagtcattggattaattaaagctccagagcaaacgtcagatgagtccaaaaacccagaaaattcaacattgctaactaggactccaaccaagggtgacaatcatatttccaatgttttagatgacaacttattagaatcagaatcgacaaactctttgctattgttacgtgagaatgcaagcacatatgggcggtcaccttccgggtttagaccgcggtattccattacgtccgcttctctcaatccgcgtcaccaaagaaggaaatcagatactatttcaacttcaaggcgaccagccaaatccttttcattttcagttgcttctcccacatcaaggatgttgaggcaatccagcaaaatcaatggacacccaccgccaattctgcagaaaaaaacaagtatgggccggctaatgtttcctatggatgccaagacctatgacccggaaagccatgaacttatcccacattctgccagcattgaaacacctgccatggtagacaagaaattgcattttggccgaaagagtagatacttgaggcatatgaacaaaaaatgggtcagcagtagcaacatattatacacagattcggataaagaagaccatcctacattgagactgataagtaacttcgattcagacgcaatgattcatagtgatttagcgggcaatttcaggcgtcatagcattgatggaagacccccttctcaagctacaaagagctcaccgtttcgatcgaggccttcttcttcaacgcagcacaaaagcaccaccagttttactcaataa

SEQ ID NO: 176 - protein, 401 aa, Bacillus subtilis subtilis 168
MLRGTYLFGYAFFFTVGIIHISTGSLTPFLLEAFNKTTDDISVIIFFQFTGFLSGVLIAPLMIKKYSHFRTLTLALTIMLVALSIFFLTKDWYYIIVMAFLLGYGAGTLETTVGSFVIANFESNAEKMSKLEVLFGLGALSFPLLINSFIDINNWFLPYYCIFTFLFVLFVGWLIFLSKNREYAKNANQQVTFPDGGAFQYFIGDRKKSKQLGFFVFFAFLYAGIETNFANFLPSIMINQDNEQISLISVSFFWVGIIIGRILIGFVSRRLDFSKYLLFSCSCLIVLLIAFSYISNPILQLSGTFLIGLSIAGIFPIALTLASIIIQKYVDEVTSLFIASASFGGAIISFLIGWSLNQDTILLTMGIFTTMAVILVGISVKIRRTKTEDPISLENKASKTQ

SEQ ID NO: 177 - protein, 472 aa, Streptomyces coelicolor
MASTSQAPSPGAGTAHPDHLGHVIFIAAAAAMGGFLFGYDSSVINGAVEAIRDRYDVGSAVLAQVIAVALIGCAIGAATAGRIADRIGRIRCMQIAAVLFTVSAVGSALPFALWDLAMWRIIGGFAIGMASVIGPAYIAEVSPPAYRGRLGSFQQAAIVIGIAVSQLVNWGLLNAAGGDQRGELMGLEAWQVMLGVMVIPAVLYGLLSFAIPESPRFLISVGKRERAKKILEEVEGKDVDFDARVTEIEHAMHREEKSSFKDLLGGSFFFKPIVWIGIGLSVFQQFVGINVAFYYSSTLWQSVGVDPADSFFYSFTTSIINIVGTVIAMIFVDRVGRKPLALIGSVGMVIGLALEAWAFSFDLVDGKLPATQGWVALIAAHVFVLFFALSWGVVVWVFLGEMFPNRIRAAALGVAASAQWIANWAITASFPSLADWNLSGTYVIYTIFAALSIPFVLKFVKETKGKALEEMG

SEQ ID NO: 178 - protein, 472 aa, Streptomyces coelicolor A3; identical to SEQ ID NO: 177

SEQ ID NO: 179 - protein, 498 aa, Mycobacterium smegmatis  MC2 155
MNVIGITLLPRGRIMSHGPVSDDTPSIFGDDDQAASSGRTAVRIAAVAALGGLLFGYDSAVINGAVDSIQEDFGIGNYALGLAVASALLGAAAGALSAGRIADRIGRIAVMKIAAVLFFISAFGTGFAPETVTLVVFRIVGGIGVGVASVIAPAYIAETSPPGIRGRLGSLQQLAIVLGIFTSFVVNWLLQWAAGGPNEVLAMGLDAWRWMFLAMAVPAVLYGALAFTIPESPRYLVATHKIPEARRVLSMLLGQKNLEITITRIRDTLEREDKPSWRDLKKPTGGIYGIVWVGLGLSIFQQFVGINVIFYYSNVLWQAVGFSADQSAIYTVITSVVNVLTTLIAIALIDKIGRKPLLLIGSSGMAVTLATMAVIFANATVKPDGTPDLPGASGLIALIAANLFVVAFGMSWGPVVWVLLGEMFPNRFRAAALGLAAAGQWAANWLITVSFPELRNHLGLAYGFYALCAVLSFLFVSKWVEETRGKNLEDMHAEALGH

SEQ ID NO: 180 - DNA, 1647 bp, Lactococcus lactis
atgtatacagtaggagattacctattagaccgattacacgagttaggaattgaagaaatttttggagtccctggagactataacttacaatttttagatcaaattatttcccgcaaggatatgaaatgggtcggaaatgctaatgaattaaatgcttcttatatggctgatggctatgctcgtactaaaaaagctgccgcatttcttacaacctttggagtaggtgaattgagtgcagttaatggattagcaggaagttacgccgaaaatttaccagtagtagaaatagtgggatcacctacatcaaaagtccaaaatgaaggaaaatttgttcatcatacgctggctgacggtgattttaaacactttatgaaaatgcacgaacctgttacagcagctcgaactttactgacagcagaaaatgcaaccgttgaaattgaccgagtactttctgcactactaaaagaaagaaaacctgtctatatcaacttaccagttgatgttgctgctgcaaaagcagagaaaccctcactccctttgaaaaaagaaaatccaacttcaaatacaagtgaccaagagattttgaataaaattcaagaaagcttgaaaaatgccaaaaaaccaatcgtgattacaggacatgaaataattagctttggcttagaaaatacagtcactcaatttatttcaaagacaaaactccctattacgacattaaactttggaaaaagttcagttgatgaaactctcccttcatttttaggaatctataatggtaaactctcagagcctaatcttaaagaattcgtggaatcagccgacttcatcctgatgcttggagttaaactcacagactcttcaacaggagcatttacccatcatttaaatgaaaataaaatgatttcactgaacatagacgaaggaaaaatatttaacgaaagcatccaaaattttgattttgaatccctcatctcctctctcttagacctaagcggaatagaatacaaaggaaaatatatcgataaaaagcaagaagactttgttccatcaaatgcgcttttatcacaagaccgcctatggcaagcagttgaaaacctaactcaaagcaatgaaacaatcgttgctgaacaagggacatcattctttggcgcttcatcaattttcttaaaaccaaagagtcattttattggtcaacccttatggggatcaattggatatacattcccagcagcattaggaagccaaattgcagataaagaaagcagacaccttttatttattggtgatggttcacttcaacttacagtgcaagaattaggattagcaatcagagaaaaaattaatccaatttgctttattatcaataatgatggttatacagtcgaaagagaaattcatggaccaaatcaaagctacaatgatattccaatgtggaattactcaaaattaccagaatcatttggagcaacagaagaacgagtagtctcgaaaatcgttagaactgaaaatgaatttgtgtctgtcatgaaagaagctcaagcagatccaaatagaatgtactggattgagttagttttggcaaaagaagatgcaccaaaagtactgaaaaaaatgggtaaactatttgctgaacaaaataaatcataa

SEQ ID NO: 181 - protein, 548 aa, Lactococcus lactis
MYTVGDYLLDRLHELGIEEIFGVPGDYNLQFLDQIISRKDMKWVGNANELNASYMADGYARTKKAAAFLTTFGVGELSAVNGLAGSYAENLPVVEIVGSPTSKVQNEGKFVHHTLADGDFKHFMKMHEPVTAARTLLTAENATVEIDRVLSALLKERKPVYINLPVDVAAAKAEKPSLPLKKENPTSNTSDQEILNKIQESLKNAKKPIVITGHEIISFGLENTVTQFISKTKLPITTLNFGKSSVDETLPSFLGIYNGKLSEPNLKEFVESADFILMLGVKLTDSSTGAFTHHLNENKMISLNIDEGKIFNESIQNFDFESLISSLLDLSGIEYKGKYIDKKQEDFVPSNALLSQDRLWQAVENLTQSNETIVAEQGTSFFGASSIFLKPKSHFIGQPLWGSIGYTFPAALGSQIADKESRHLLFIGDGSLQLTVQELGLAIREKINPICFIINNDGYTVEREIHGPNQSYNDIPMWNYSKLPESFGATEERVVSKIVRTENEFVSVMKEAQADPNRMYWIELVLAKEDAPKVLKKMGKLFAEQNKS

SEQ ID NO: 182 - DNA, 1164 bp, Escherichia coli
atgaacaactttaatctgcacaccccaacccgcattctgtttggtaaaggcgcaatcgctggtttacgcgaacaaattcctcacgatgctcgcgtattgattacctacggcggcggcagcgtgaaaaaaaccggcgttctcgatcaagttctggatgccctgaaaggcatggacgtgctggaatttggcggtattgagccaaacccggcttatgaaacgctgatgaacgccgtgaaactggttcgcgaacagaaagtgactttcctgctggcggttggcggcggttctgtactggacggcaccaaatttatcgccgcagcggctaactatccggaaaatatcgatccgtggcacattctgcaaacgggcggtaaagagattaaaagcgccatcccgatgggctgtgtgctgacgctgccagcaaccggttcagaatccaacgcaggcgcggtgatctcccgtaaaaccacaggcgacaagcaggcgttccattctgcccatgttcagccggtatttgccgtgctcgatccggtttatacctacaccctgccgccgcgtcaggtggctaacggcgtagtggacgcctttgtacacaccgtggaacagtatgttaccaaaccggttgatgccaaaattcaggaccgtttcgcagaaggcattttgctgacgctaatcgaagatggtccgaaagccctgaaagagccagaaaactacgatgtgcgcgccaacgtcatgtgggcggcgactcaggcgctgaacggtttgattggcgctggcgtaccgcaggactgggcaacgcatatgctgggccacgaactgactgcgatgcacggtctggatcacgcgcaaacactggctatcgtcctgcctgcactgtggaatgaaaaacgcgataccaagcgcgctaagctgctgcaatatgctgaacgcgtctggaacatcactgaaggttccgatgatgagcgtattgacgccgcgattgccgcaacccgcaatttctttgagcaattaggcgtgcctacccacctctccgactacggtctggacggcagctccatcccggctttgctgaaaaaactggaagagcacggcatgacccaactgggcgaaaatcatgacattacgttggatgtcagccgccgtatatacgaagccgcccgctaa

SEQ ID NO: 183 - protein, 387 aa, Escherichia coli
MNNFNLHTPTRILFGKGAIAGLREQIPHDARVLITYGGGSVKKTGVLDQVLDALKGMDVLEFGGIEPNPAYETLMNAVKLVREQKVTFLLAVGGGSVLDGTKFIAAAANYPENIDPWHILQTGGKEIKSAIPMGCVLTLPATGSESNAGAVISRKTTGDKQAFHSAHVQPVFAVLDPVYTYTLPPRQVANGVVDAFVHTVEQYVTKPVDAKIQDRFAEGILLTLIEDGPKALKEPENYDVRANVMWAATQALNGLIGAGVPQDWATHMLGHELTAMHGLDHAQTLAIVLPALWNEKRDTKRAKLLQYAERVWNITEGSDDERIDAAIAATRNFFEQLGVPTHLSDYGLDGSSIPALLKKLEEHGMTQLGENHDITLDVSRRIYEAAR

SEQ ID NO: 184 - protein, 172 aa, Synechococcus elongatus PCC7942
MKRTLSVLVEDEAGVLTRIAGLFARRSFNIESLAVGPAEQVGISRITMVVQGDDREIEQITKQLYKLINVLKVQDISEVPCVERELMLIKVNANSSNRSEILELVQIFRARVVDVAEDSLIVEVVGDPGKMVAIVQVLQRFGIREISRTGKVALTRESGVNTEFLKALEARV

SEQ ID NO: 185 - protein, 612 aa, Synechococcus elongatus PCC7942
MQLQTVTIQQRATGAYALIDSLCQHGVKHIFGYPGGAILPIYDELHRAEAAGRVQHILVRHEQGAVHAADAYSRATGEVGVCFATSGPGATNLVTGIATAQMDSIPMVVVTGQVPRTAIGTDAFQETDIYGITLPIVKHSYVVRDPRDMARIVAEAFHIAQSGRPGPVLIDVPKDVGTEEFDYVPVAPGDIRLPGYRPTTRGNPRQIAQAIALVKVARRPLLYVGGGAITAGAHAELRAFAERFQLPVTTTLMGKGAFDERHPLALGMLGMHGTAYANFAVSECDLLIAVGARFDDRVTGKLDEFASKAQVIHVDIDPAEVGKNRVPEVPIVGDVRQVLNELLARAEEQISADDATRTQPWLDRIAYWKREYPLQIPYYADVLSPQQVIHSLGEAAPDAYFTTDVGQHQMWAAQFIKNGPRRWISSAGLGTMGFGMPAAMGAQMALPDDTVICVAGDASILMNIQELGTLAQYNIPIKVVVVNNGWQGMVRQWQEAFYDERYSNSNMERGMPDFVKLAEAFGIKGMRVSHPDELQAAIAEMLAFDGPVFLDAIVKRDENCYPMVPSGHSNAQMLGLPKDPTLDLDLAIATCSSCGAKTLPSHKFCPDCGAKL

SEQ ID NO: 186 - protein, 327 aa, Synechococcus elongatus PCC7942
MYYDADANLDLLNGKTVAIIGYGSQGHAHALNLRDSGVNVVVGLYPGSKSAAKAEAEGLKVLPVAEAAQAADWIMILLPDEFQKSVFENEIRPALSAGKVLAFAHGFNIHFAQIVPPADVDVVMIAPKSPGHLVRRTYEQGQGVPCLFAIYQDASGQARDRAMAYAKGIGGTRAGILETSFREETETDLFGEQAVLCGGLSALIKAGFETLVEAGYQPELAYFECLHEVKLIVDLIVEGGLAAMRDSISNTAEYGDYVTGPRLITEETKAEMKRVLADIQQGRFALDFVQECGAGKPVMTATRRLEAEHPIESVGKDLRAMFSWLKK

SEQ ID NO: 187 - protein, 619 aa, Synechococcus elongatus PCC7942
MPQYRSRTTTYGRNMAGARALWRATGMKDEDFEKPIIAVANSFTQFVPGHVHLKDLGQLVAREIERAGGVAKEFNTIAVDDGIAMGHGGMLYSLPSRDLIADSVEYMVNAHCADALVCISNCDKITPGMLMAALRLNIPAVFVSGGPMEAGKVILNGEERHLDLVDAMVVAADDRESDEDVATIERSACPTCGSCSGMFTANSMNCLTEALGLSLPGNGSLLATHGDRKELFLEAGRLAVKLAKQYYEQDDESVLPRSIASFKAFENAICLDIAMGGSTNTVLHLLAAAHEAGVDFTMKDIDRLSRKIPNLCKVAPSTQKYHMEDVHRAGGVIAILGELDRAGLLHREVPTVHSPSLGAALDQWDINRETATEEAKSRYLAAPGGVPTQEAFSQSKRWTALDLDRENGCIRDIEHAYSQDGGLAVLYGNLAEQGCIVKTAGVDENILVFSGPAVVCESQDEAVNWILNGRVKEGDVVLIRYEGPRGGPGMQEMLYPTSYLKSKGLGKACALITDGRFSGGTSGLSIGHVSPEAAEGGLIALVEQGDRIEIDIPNRRIHLAVSEEELAHRRAAMEARGDQAWTPKDRDRPISQALQAYAAMTTSAARGGVRDLSQILGSR

SEQ ID NO: 188 - protein, 542 aa, Synechococcus elongatus PCC7942
MTRPASAAIAVYDTTLRDGAQREGLSLSLEDKLRIAHCLDRLGVKFIEGGWPGANPKDVQFFWELQQRPLQQAEVVAFCSTRRPGQIAGEDELLKALLAAGTTWVTIFGKSWDLHVVEGLKTSLDENLVMISDSIAYLRTCDRRVIYDAEHWFDGYLANPDYALQTLAAAIEAGAEWIVLCDTNGGCLPHQISEIVAAVLDRFPSLAPDQTGPQLGIHTHNDSETAVANAIAAVQAGARMVHGTINGYGERCGNANLCSVIPNLQLKLGYDCVETEQLMQLTATSRLVSEIVNLAPDDHAAYVGQSAFAHKGGIHVSAVERNPLTYEHIRPEQVGNLRRIVISEQSGLSNVLAKARSFGLDLQRNDPACRDLLARLKELESQGYQFEAAEASFDLLMREATGDRPHFFDLKDFHVHCSKQRQELNALATVKVAVTGRDILESAEGNGPVSALDAALRKAIGSFYPAVMQFHLSDYKVRILDGAAGTSAKTRVLVESSNGSQRWSTVGVSGNIIEASYQAVVEGIEYGLLLQQQAPLQAAEKP

SEQ ID NO: 189 - protein, 540 aa, Synechococcus elongatus PCC7942
MASASSNDRILIFDTTLRDGEQSPGASLNLEEKLAIARQLARLNVDIIEAGFAFASPGDFEAVQRIAAEVGTPDGPTICSLARATRQDIKAAAEALAPAAKGRIHTFIATSDIHLEYKLKKTRAEVLAVIPEMVGYAASLVDDVEFSPEDAGRSDPEFLYECLEAAIAAGAKTINIPDTVGYTTPSEFGALIGGIKQNVCNIDQAIISVHGHNDLGLAVANFLEAVKNGARQLECTINGIGERAGNAALEELVMALHVRRQYFNPFLGRAADSEAPLTQVNTREIYKTSRLVSNLTGMLVQPNKAIVGANAFAHESGIHQDGVLKNKLTYEIVDAETIGLSTNRITLGKLSGRNAFRTRLQELGYDLGEDDLNRAFLRFKELADKKREVTDRDLEAIVNDETQQAPELFKLELVQVSAGDHARPTATVTLRTPEGEELTDAAIGTGPVDAIYRAINRVVNIPNELIEFSVKSVTAGIDAIGEVTIRLRHEDRIFSGHSANTDILVASAQAYIHALNRLAEALQKDKPLHPQEPIVAGMGR

SEQ ID NO: 190 - protein, 202 aa, Synechococcus elongatus PCC7942
MGSEILEVTGRAVPLVGNDIDTDRIIPARFLRSVTFDGLGANVFIDDRQQLQGQHPFDQAQYQGATVLVVNRNFGCGSSREHAPQAIAKWGIQAIVGESFAEIFFGNCLSLGIPCVTAGAAAVAELQAAIASDPSQPVTVDLEELQVRRGAWSAELTLAPGPLQMLRSGQWDATGQLVANAEAIAQTAANLPYVGWQAIAAS

SEQ ID NO: 191 - protein, 468 aa, Synechococcus elongatus PCC7942
MSRGTLFDKVWDLHTVATLPSGQTQLFIGLHLIHEVTSPQAFSMLRDRGLTVKFPGRTVATVDHIVPTENQARPFADSLAEEMIVTLERNCRENGIRFYNIGSGSQGIVHVIAPEQGLTQPGMTIACGDSHTSTHGAFGAIAFGIGTSQVRDVLASQTLALSKLKVRKIEVNGELQPGVYAKDVILHIIRKLGVKGGVGYAYEFAGSTFAAMSMEERMTVCNMAIEGGARCGYVNPDQITYDYLQGREFAPQGEAWDRAIAWWESLRSEADAEYDDVVVFDAAEIAPTVTWGITPGQGIGITETIPTPDSLLDEDRAVAAEAYSYMDLEPGAPLQGTKVDVCFIGSCTNGRLSDLREAAKVAQGRKVAAGIKAFVVPGSERVKQQAEAEGLDQIFTAAGFEWRQAGCSMCLAMNPDKLEGRQISASSSNRNFKGRQGSASGRTLLMSPAMVAAAAIAGEVTDVRNWLN

SEQ ID NO: 192 - protein, 365 aa, Synechococcus elongatus PCC7942
MTRSYRITLLPGDGIGPEIMAVTVDILRAIGRQFDLNFEFEEALIGGSAIDATGEPLPEATLATCRNSDAVLLAAIGGYKWDSLPRSQRPETGLLGLRAGLGLFANLRPAAILPQLVDASSLKREVIEGVDLMVVRELTGGIYFGEPKGCFADEQGRQRAFNTMVYREDEIDRIGRVAFDIARKRGKRLCSVDKANVLEVSQLWRDRMTLLGSDYADVELSHLYVDNAAMQLVRWPKQFDTIVTGNLFGDILSDIAAMLTGSIGMLPSASLGAEGPGVFEPVHGSAPDIAGQDKANPLAQVLSAAMMLRYGLDEPEAAARIEAAVNQVLDQGYRTGDLYSEGMTLVGCKGMGDALLAALESPVSA

SEQ ID NO: 193 - protein, 570 aa, Bacillus subtilis subtilis 168
MTKATKEQKSLVKNRGAELVVDCLVEQGVTHVFGIPGAKIDAVFDALQDKGPEIIVARHEQNAAFMAQAVGRLTGKPGVVLVTSGPGASNLATGLLTANTEGDPVVALAGNVIRADRLKRTHQSLDNAALFQPITKYSVEVQDVKNIPEAVTNAFRIASAGQAGAAFVSFPQDVVNEVTNTKNVRAVAAPKLGPAADDAISAAIAKIQTAKLPVVLVGMKGGRPEAIKAVRKLLKKVQLPFVETYQAAGTLSRDLEDQYFGRIGLFRNQPGDLLLEQADVVLTIGYDPIEYDPKFWNINGDRTIIHLDEIIADIDHAYQPDLELIGDIPSTINHIEHDAVKVEFAEREQKILSDLKQYMHEGEQVPADWKSDRAHPLEIVKELRNAVDDHVTVTCDIGSHAIWMSRYFRSYEPLTLMISNGMQTLGVALPWAIGASLVKPGEKVVSVSGDGGFLFSAMELETAVRLKAPIVHIVWNDSTYDMVAFQQLKKYNRTSAVDFGNIDIVKYAESFGATGLRVESPDQLADVLRQGMNAEGPVIIDVPVDYSDNINLASDKLPKEFGELMKTKAL

SEQ ID NO: 194 - protein, 491 aa, Escherichia coli K-12, MG1655
MANYFNTLNLRQQLAQLGKCRFMGRDEFADGASYLQGKKVVIVGCGAQGLNQGLNMRDSGLDISYALRKEAIAEKRASWRKATENGFKVGTYEELIPQADLVINLTPDKQHSDVVRTVQPLMKDGAALGYSHGFNIVEVGEQIRKDITVVMVAPKCPGTEVREEYKRGFGVPTLIAVHPENDPKGEGMAIAKAWAAATGGHRAGVLESSFVAEVKSDLMGEQTILCGMLQAGSLLCFDKLVEEGTDPAYAEKLIQFGWETITEALKQGGITLMMDRLSNPAKLRAYALSEQLKEIMAPLFQKHMDDIISGEFSSGMMADWANDDKKLLTWREETGKTAFETAPQYEGKIGEQEYFDKGVLMIAMVKAGVELAFETMVDSGIIEESAYYESLHELPLIANTIARKRLYEMNVVISDTAEYGNYLFSYACVPLLKPFMAELQPGDLGKAIPEGAVDNGQLRDVNEAIRSHAIEQVGKKLRGYMTDMKRIAVAG

SEQ ID NO: 195 - protein, 616 aa, Escherichia coli K-12, MG1655
MPKYRSATTTHGRNMAGARALWRATGMTDADFGKPIIAVVNSFTQFVPGHVHLRDLGKLVAEQIEAAGGVAKEFNTIAVDDGIAMGHGGMLYSLPSRELIADSVEYMVNAHCADAMVCISNCDKITPGMLMASLRLNIPVIFVSGGPMEAGKTKLSDQIIKLDLVDAMIQGADPKVSDSQSDQVERSACPTCGSCSGMFTANSMNCLTEALGLSQPGNGSLLATHADRKQLFLNAGKRIVELTKRYYEQNDESALPRNIASKAAFENAMTLDIAMGGSTNTVLHLLAAAQEAEIDFTMSDIDKLSRKVPQLCKVAPSTQKYHMEDVHRAGGVIGILGELDRAGLLNRDVKNVLGLTLPQTLEQYDVMLTQDDAVKNMFRAGPAGIRTTQAFSQDCRWDTLDDDRANGCIRSLEHAYSKDGGLAVLYGNFAENGCIVKTAGVDDSILKFTGPAKVYESQDDAVEAILGGKVVAGDVVVIRYEGPKGGPGMQEMLYPTSFLKSMGLGKACALITDGRFSGGTSGLSIGHVSPEAASGGSIGLIEDGDLIAIDIPNRGIQLQVSDAELAARREAQDARGDKAWTPKNRERQVSFALRAYASLATSADKGAVRDKSKLGG

SEQ ID NO: 196 - DNA, 627 bp, Escherichia coli
atgatgaacttcaacaatgttttccgctggcatttgcccttcctgttcctggtcctgttaaccttccgtgccgccgcagcggacacgttattgattctgggtgatagcctgagcgccgggtatcgaatgtctgccagcgcggcctggcctgccttgttgaatgataagtggcagagtaaaacgtcggtagttaatgccagcatcagcggcgacacctcgcaacaaggactggcgcgccttccggctctgctgaaacagcatcagccgcgttgggtgctggttgaactgggcggcaatgacggtttgcgtggttttcagccacagcaaaccgagcaaacgctgcgccagattttgcaggatgtcaaagccgccaacgctgaaccattgttaatgcaaatacgtctgcctgcaaactatggtcgccgttataatgaagcctttagcgccatttaccccaaactcgccaaagagtttgatgttccgctgctgcccttttttatggaagaggtctacctcaagccacaatggatgcaggatgacggtattcatcccaaccgcgacgcccagccgtttattgccgactggatggcgaagcagttgcagcctttagtaaatcatgactcataa

SEQ ID NO: 197 - DNA, 1474 bp, Cuphea hookeriana
ctggataccattttccctgcgaaaaaacatggtggctgctgcagcaagttccgcattcttccctgttccagccccgggagcctcccctaaacccgggaagttcggaaattggccctcgagcttgagcccttccttcaagcccaagtcaatccccaatggcggatttcaggttaaggcaaatgacagcgcccatccaaaggctaacggttctgcagttagtctaaagtctggcagcctcaacactcaggaggacacttcgtcgtcccctcctcctcggactttccttcaccagttgcctgattggagtaggcttctgactgcaatcacgaccgtgttcgtgaaatctaagaggcctgacatgcatgatcggaaatccaagaggcctgacatgctggtggactcgtttgggttggagagtactgttcaggatgggctcgtgttccgacagagtttttcgattaggtcttatgaaataggcactgatcgaacggcctctatagagacacttatgaaccacttgcaggaaacatctctcaatcattgtaagagtaccggtattctccttgacggcttcggtcgtactcttgagatgtgtaaaagggacctcatttgggtggtaataaaaatgcagatcaaggtgaatcgctatccagcttggggcgatactgtcgagatcaatacccggttctcccggttggggaaaatcggtatgggtcgcgattggctaataagtgattgcaacacaggagaaattcttgtaagagctacgagcgcgtatgccatgatgaatcaaaagacgagaagactctcaaaacttccatacgaggttcaccaggagatagtgcctctttttgtcgactctcctgtcattgaagacagtgatctgaaagtgcataagtttaaagtgaagactggtgattccattcaaaagggtctaactccggggtggaatgacttggatgtcaatcagcacgtaagcaacgtgaagtacattgggtggattctcgagagtatgccaacagaagttttggagacccaggagctatgctctctcgcccttgaatataggcgggaatgcggaagggacagtgtgctggagtccgtgaccgctatggatccctcaaaagttggagtccgttctcagtaccagcaccttctgcggcttgaggatgggactgctatcgtgaacggtgcaactgagtggcggccgaagaatgcaggagctaacggggcgatatcaacgggaaagacttcaaatggaaactcggtctcttagaagtgtctcggaacccttccgagatgtgcatttcttttctccttttcattttgtggtgagctgaaagaagagcatgtcgttgcaatcagtaaattgtgtagttcgtttttcgctttgcttcgctcctttgtataataatatggtcagtcgtctttgtatcatttcatgttttcagtttatttacgccatataattttt

SEQ ID NO: 198 - protein, 5 aa, Artificial Sequence
  Pah1-encoded PAP1 enzyme catalytic motif
  VARIANT (2)..(2): Xaa = Any Amino Acid
  VARIANT (4)..(4): Xaa = Any Amino Acid
DXDXT

SEQ ID NO: 199 - DNA, 1665 bp, Mycobacterium bovis
gtgaacccctcgacgacacaggcgcgcgtcgtcgtcgacgaactgatccgcggcggcgttcgcgacgtggtgctgtgtccgggctcgcgcaatgcgccgctggccttcgcgctgcaggacgccgaccggtccggccggatccggttgcacgttcgcatcgatgaacgcaccgccggctacctggccatcgggctggcaatcggggcgggcgcgccggtgtgtgtcgcgatgacatccggcaccgccgtggccaacctcggtccggcggtggtggaggcaaactacgctcgggtgccgctgatcgtgctgtcagccaatcggccctacgagctgctgggcaccggcgccaaccagaccatggaacagctgggctatttcggcacccaggtgcgcgccagcatcagcctggggctggccgaggacgcacccgagcggacctcggcgctcaacgcgacctggcgatcggctacgtgccgagtgttggcggccgccacgggtgctcgcaccgccaacgcgggccccgtgcacttcgacatcccgctgcgcgaaccgctggtgcccgatcccgagcccctcggcgcggtcaccccgccgggccggcctgctggcaagccgtggacctacacgccgccggtcaccttcgaccagccactggacatcgacctgtcggtcgacaccgtggtcatctccgggcatggcgctggcgtgcaccccaacctcgcggcgttgccgaccgtcgcagaaccgacggcgccgcggtccggggacaacccgttgcacccgctggcgctgccgctgctgcgccctcaacaggtgatcatgctgggccggccgacactgcatcgtccggtatcggtgctgctggccgacgcagaagtgccggtattcgcattgacaaccggtccacgctggccggatgtctcgggtaactcgcaggccaccggcacgcgggcggtcaccaccggcgcgccgcggcccgcgtggctggaccggtgtgcggcgatgaaccggcacgcgatcgcggcggttcgggaacagctcgcggcgcacccgttgaccaccgggctgcatgtcgcggcggcggtgtcgcatgcgctgcggcccggtgaccagctggtgctcggggcatccaatccggtgcgggatgtggcgttggccggtttggacacccgcggcatccgggtacggtccaaccgtggggtcgccggcatcgacggcaccgtgtccaccgcgatcggggcggccctagcttatgagggggctcacgagcgcaccggcagcccggactccccgccccgcaccatcgcactgatcggcgacctgacgttcgtgcacgacagctccgggctgttgatcgggccgaccgaaccgataccgcggtcattgaccatcgtggtgtctaatgacaacggcggcggcatcttcgaattgctcgagcagggtgatcccaggttctccgacgtgtcatcgcgaatcttcggcaccccacacgacgtcgatgtgggcgcattgtgccgcgcctaccacgtggaatctcgccagatcgaggtcgacgaactcggaccgaccctcgatcaacccggtgccggcatgcgcgtgctcgaggtcaaggccgaccggtcgtcgttgcgacaattgcacgccgccatcaaggcggctctgtga

SEQ ID NO: 200 - protein, 554 aa, Mycobacterium bovis
MNPSTTQARVVVDELIRGGVRDVVLCPGSRNAPLAFALQDADRSGRIRLHVRIDERTAGYLAIGLAIGAGAPVCVAMTSGTAVANLGPAVVEANYARVPLIVLSANRPYELLGTGANQTMEQLGYFGTQVRASISLGLAEDAPERTSALNATWRSATCRVLAAATGARTANAGPVHFDIPLREPLVPDPEPLGAVTPPGRPAGKPWTYTPPVTFDQPLDIDLSVDTVVISGHGAGVHPNLAALPTVAEPTAPRSGDNPLHPLALPLLRPQQVIMLGRPTLHRPVSVLLADAEVPVFALTTGPRWPDVSGNSQATGTRAVTTGAPRPAWLDRCAAMNRHAIAAVREQLAAHPLTTGLHVAAAVSHALRPGDQLVLGASNPVRDVALAGLDTRGIRVRSNRGVAGIDGTVSTAIGAALAYEGAHERTGSPDSPPRTIALIGDLTFVHDSSGLLIGPTEPIPRSLTIVVSNDNGGGIFELLEQGDPRFSDVSSRIFGTPHDVDVGALCRAYHVESRQIEVDELGPTLDQPGAGMRVLEVKADRSSLRQLHAAIKAAL

SEQ ID NO: 201 - DNA, 1638 bp, Synechococcus sp PCC 7002
gtgaatactgcagaattattgatccgatgtctagaaaatgaaggggtggagtatatttttgggctgccgggggaagaaaatctccatatcctcgaagcccttaaggagtctcccatccgctttatcaccgtccgccatgaacagggtgccgcttttatggccgatgtgtatggtcgtttaaccgggaaagcaggggtttgtctgtctaccctggggcctggggctaccaatctaatgactggggttgccgatgcgaacctcgatggggcgcccctgattgcgattacagggcaggtgggtaccgaccgcatgcacattgaatcccaccaatatcttgatctggtggcgatgtttgcccccgtcaccaagtggaataaacaaattgtccgaccgaacacgaccccggaggtggtacgtcgtgcctttaaaattgcccagcaggaaaaaccaggggcagtacacatcgatctccctgaaaatattgcggcgatgcccgtagaaggtcagcccctccagcgggatggtcgtgaaaaaatctatgcttcaagccggagtttaaaccgggctgccgaggcgatcgcccatgccaagagtcctttaattctggtgggtaatggcattattcgcgccgatgccgccgaagccctcaccgattttgccacccagttgaatattcccgtagtcaacacctttatgggcaaaggggcaattccctacacccatcccctgtccctgtggacggtaggactccaacagcgggattttgtcacctgtgcctttgaacagagcgatttggtgattgcagtgggctacgatctgatcgaatattcccccaaacgctggaacccagagggaacgaccccaattatccacattggtgaagtggccgccgaaattgatagtagttatattcccctcacagaagttgtcggcgacattggcgatgccttaaatgaaattcgtaaacgcacagaccgtgagggcaaaaccgcgccaaaatttctcaatgtccgggctgagattcgggaggactatgaacgccacggcaccgacgctagttttccggtcaaaccccaaaaaatcatctacgatctccgccaagtgatggccccagaggacatcgtcatttctgatgtgggggcccacaaaatgtggatggcccgccattaccattgcgatcgccccaatacttgcctgatttccaatggatttgcggcgatgggcattgcgattcccggtgctgtagcagccaaattagtctacccagaaaaaaatgtcgtggctgtcacaggggacgggggatttatgatgaactgccaggagctcgaaacggccctgcgcattggggcgaactttgtcaccctaattttcaatgatggtggctatggtttgatcggttggaaacagattaaccagttcggtgcaccagcctttgtggagtttggcaatcccgattttgtgcagtttgccgaaagtatgggcctcaagggttatcggattaccgccgccgccgaccttgtgccgaccttaaaagaagccctagcccaggatgtaccagcggtgatcgattgccccgtggactacagtgagaatgtgaaattctcccaaaaatcaggggatttaatctgccgtatgtaa

SEQ ID NO: 202 - protein, 545 aa, Synechococcus sp PCC 7002
MNTAELLIRCLENEGVEYIFGLPGEENLHILEALKESPIRFITVRHEQGAAFMADVYGRLTGKAGVCLSTLGPGATNLMTGVADANLDGAPLIAITGQVGTDRMHIESHQYLDLVAMFAPVTKWNKQIVRPNTTPEVVRRAFKIAQQEKPGAVHIDLPENIAAMPVEGQPLQRDGREKIYASSRSLNRAAEAIAHAKSPLILVGNGIIRADAAEALTDFATQLNIPVVNTFMGKGAIPYTHPLSLWTVGLQQRDFVTCAFEQSDLVIAVGYDLIEYSPKRWNPEGTTPIIHIGEVAAEIDSSYIPLTEVVGDIGDALNEIRKRTDREGKTAPKFLNVRAEIREDYERHGTDASFPVKPQKIIYDLRQVMAPEDIVISDVGAHKMWMARHYHCDRPNTCLISNGFAAMGIAIPGAVAAKLVYPEKNVVAVTGDGGFMMNCQELETALRIGANFVTLIFNDGGYGLIGWKQINQFGAPAFVEFGNPDFVQFAESMGLKGYRITAAADLVPTLKEALAQDVPAVIDCPVDYSENVKFSQKSGDLICRM

SEQ ID NO: 203 - DNA, 1116 bp, Porphyromonas gingivalis
atgcaacttttcaaactcaagagtgtaacacatcactttgacacttttgcagaatttgccaaggaattctgtcttggagaacgcgacttggtaattaccaacgagttcatctatgaaccgtatatgaaggcatgccagctcccctgccattttgttatgcaggagaaatatgggcaaggcgagccttctgacgaaatgatgaataacatcttggcagacatccgtaatatccagttcgaccgcgtaatcggtatcggaggaggtacggttattgacatctctaaacttttcgttctgaaaggattaaatgatgtactcgatgcattcgaccgcaaaatacctcttatcaaagagaaagaactgatcattgtgcccacaacatgcggaacgggtagcgaggtgacgaacatttctatcgcagaaatcaaaagccgtcacaccaaaatgggattggctgacgatgccattgttgcagaccatgccatcatcatacctgaacttctgaagagcttgcctttccacttctacgcatgcagtgcaatcgatgctcttatccatgccatcgagtcatacgtatctcctaaagccagtccatattctcgtctgttcagtgaggcggcttgggacattatcctggaagtattcaagaaaatcgccgaacacggccctgaataccgcttcgaaaagctgggagaaatgatcatggccagcaactatgccggtatagccttcggaaatgcaggagtaggagccgtccacgcactatcctacccgttgggaggcaactatcacgtgccgcatggagaagcaaactatcagttcttcacagaggtattcaaagtataccaaaagaagaatcctttcggctatatagtcgaactcaactggaagctctccaagatactgaactgccagcccgaatacgtatatccgaagctggatgaacttctcggatgccttcttaccaagaaacctttgcacgaatacggcatgaaggacgaagaggtaagaggctttgcggaatcagtgcttaagacacagcaaagattgctcgccaacaactacgtagagcttactgtagatgagatcgaaggtatctacagaagactctactaa

SEQ ID NO: 204 - protein, 371 aa, Porphyromonas gingivalis
MQLFKLKSVTHHFDTFAEFAKEFCLGERDLVITNEFIYEPYMKACQLPCHFVMQEKYGQGEPSDEMMNNILADIRNIQFDRVIGIGGGTVIDISKLFVLKGLNDVLDAFDRKIPLIKEKELIIVPTTCGTGSEVTNISIAEIKSRHTKMGLADDAIVADHAIIIPELLKSLPFHFYACSAIDALIHAIESYVSPKASPYSRLFSEAAWDIILEVFKKIAEHGPEYRFEKLGEMIMASNYAGIAFGNAGVGAVHALSYPLGGNYHVPHGEANYQFFTEVFKVYQKKNPFGYIVELNWKLSKILNCQPEYVYPKLDELLGCLLTKKPLHEYGMKDEEVRGFAESVLKTQQRLLANNYVELTVDEIEGIYRRLY

SEQ ID NO: 205 - DNA, 1116 bp, Clostridium kluyveri
atgaagttattaaaattggcacctgatgtttataaatttgatactgcagaggagtttatgaaatactttaaggttggaaaaggtgactttatacttactaatgaatttttatataaacctttccttgagaaattcaatgatggtgcagatgctgtatttcaggagaaatatggactcggtgaaccttctgatgaaatgataaacaatataattaaggatattggagataaacaatataatagaattattgctgtagggggaggatctgtaatagatatagccaaaatcctcagtcttaagtatactgatgattcattggatttgtttgagggaaaagtacctcttgtaaaaaacaaagaattaattatagttccaactacatgtggaacaggttcagaagttacaaatgtatcagttgcagaattaaagagaagacatactaaaaaaggaattgcttcagacgaattatatgcaacttatgcagtacttgtaccagaatttataaaaggacttccatataagttttttgtaaccagctccgtagatgccttaatacatgcaacagaagcttatgtatctccaaatgcaaatccttatactgatatgtttagtgtaaaagctatggagttaattttaaatggatacatgcaaatggtagagaaaggaaatgattacagagttgaaataattgaggattttgttataggcagcaattatgcaggtatagcttttggaaatgcaggagtgggagcggttcacgcactctcatatccaataggcggaaattatcatgtgcctcatggagaagcaaattatctgttttttacagaaatatttaaaacttattatgagaaaaatccaaatggcaagattaaagatgtaaataaactattagcaggcatactaaaatgtgatgaaagtgaagcttatgacagtttatcacaacttttagataaattattgtcaagaaaaccattaagagaatatggaatgaaagaggaagaaattgaaacttttgctgattcagtaatagaaggacagcagagactgttggtaaacaattatgaacctttttcaagagaagacatagtaaacacatataaaaagttatattaa

SEQ ID NO: 206 - protein, 371 aa, Clostridium kluyveri
MKLLKLAPDVYKFDTAEEFMKYFKVGKGDFILTNEFLYKPFLEKFNDGADAVFQEKYGLGEPSDEMINNIIKDIGDKQYNRIIAVGGGSVIDIAKILSLKYTDDSLDLFEGKVPLVKNKELIIVPTTCGTGSEVTNVSVAELKRRHTKKGIASDELYATYAVLVPEFIKGLPYKFFVTSSVDALIHATEAYVSPNANPYTDMFSVKAMELILNGYMQMVEKGNDYRVEIIEDFVIGSNYAGIAFGNAGVGAVHALSYPIGGNYHVPHGEANYLFFTEIFKTYYEKNPNGKIKDVNKLLAGILKCDESEAYDSLSQLLDKLLSRKPLREYGMKEEEIETFADSVIEGQQRLLVNNYEPFSREDIVNTYKKLY

SEQ ID NO: 207 - DNA, 1290 bp, Clostridium kluyveri
atggagtgggaagagatatataaagagaaactggtaactgcagaaaaagctgtttcaaaaatagaaaaccatagcagggtagtttttgcacatgcagtaggagaacccgtagatttagtaaatgcactagttaaaaataaggataattatataggactagaaatagttcacatggtagctatgggcaaaggtgaatatacaaaagagggtatgcaaagacattttagacataatgctttatttgtaggcggatgtactagagatgcagtaaattcaggaagagcagattatacaccttgttttttctatgaagtgccaagtttgtttaaagaaaaacgtttgcctgtagatgtagcacttattcaggtaagtgagccagataaatatggctactgcagttttggagtttccaatgactataccaagccagcagcagaaagtgctaagcttgtaattgcagaagtgaataaaaacatgccaagaactcttggagattcttttatacatgtatcagatattgattatatagtggaagcttcacacccattgttagaattgcagcctcctaaattgggagatgtagaaaaagccataggagaaaactgtgcatctttaattgaagatggagctactcttcagcttggaataggtgctataccagatgcggtacttttattcttaaagaacaaaaagaatttaggaatacattctgagatgatatcagatggtgtgatggaactggtgaaggcaggggttatcaataacaagaaaaagaccctccatccaggcaaaatagttgtaacatttttaatgggaacaaaaaaattatatgattttgtaaacaataatccaatggtagaaacttattctgtagattatgtaaataatccactggtaattatgaaaaatgacaatatggtttcaataaattcttgtgttcaagtagacttaatgggacaagtatgttctgaaagtataggattgaaacagataagtggagtgggaggccaggtagattttattagaggagctaatctatcaaagggtggaaaggctattatagctataccttccacagctggaaaaggaaaagtttcaagaataactccacttctagatactggtgctgcagttacaacttctagaaatgaagtagattatgtagttactgaatatggtgttgctcatcttaagggcaaaactttaagaaatagggcaagagctctaataaatatcgctcatccaaaattcagagaatcattaatgaatgaatttaaaaagagattttag

SEQ ID NO: 208 - protein, 429 aa, Clostridium kluyveri
MEWEEIYKEKLVTAEKAVSKIENHSRVVFAHAVGEPVDLVNALVKNKDNYIGLEIVHMVAMGKGEYTKEGMQRHFRHNALFVGGCTRDAVNSGRADYTPCFFYEVPSLFKEKRLPVDVALIQVSEPDKYGYCSFGVSNDYTKPAAESAKLVIAEVNKNMPRTLGDSFIHVSDIDYIVEASHPLLELQPPKLGDVEKAIGENCASLIEDGATLQLGIGAIPDAVLLFLKNKKNLGIHSEMISDGVMELVKAGVINNKKKTLHPGKIVVTFLMGTKKLYDFVNNNPMVETYSVDYVNNPLVIMKNDNMVSINSCVQVDLMGQVCSESIGLKQISGVGGQVDFIRGANLSKGGKAIIAIPSTAGKGKVSRITPLLDTGAAVTTSRNEVDYVVTEYGVAHLKGKTLRNRARALINIAHPKFRESLMNEFKKRF

SEQ ID NO: 209 - DNA, 2577 bp, Clostridium acetobutylicum
atgaaagttacaaatcaaaaagaactaaaacaaaagctaaatgaattgagagaagcgcaaaagaagtttgcaacctatactcaagagcaagttgataaaatttttaaacaatgtgccatagccgcagctaaagaaagaataaacttagctaaattagcagtagaagaaacaggaataggtcttgtagaagataaaattataaaaaatcattttgcagcagaatatatatacaataaatataaaaatgaaaaaacttgtggcataatagaccatgacgattctttaggcataacaaaggttgctgaaccaattggaattgttgcagccatagttcctactactaatccaacttccacagcaattttcaaatcattaatttctttaaaaacaagaaacgcaatattcttttcaccacatccacgtgcaaaaaaatctacaattgctgcagcaaaattaattttagatgcagctgttaaagcaggagcacctaaaaatataataggctggatagatgagccatcaatagaactttctcaagatttgatgagtgaagctgatataatattagcaacaggaggtccttcaatggttaaagcggcctattcatctggaaaacctgcaattggtgttggagcaggaaatacaccagcaataatagatgagagtgcagatatagatatggcagtaagctccataattttatcaaagacttatgacaatggagtaatatgcgcttctgaacaatcaatattagttatgaattcaatatacgaaaaagttaaagaggaatttgtaaaacgaggatcatatatactcaatcaaaatgaaatagctaaaataaaagaaactatgtttaaaaatggagctattaatgctgacatagttggaaaatctgcttatataattgctaaaatggcaggaattgaagttcctcaaactacaaagatacttataggcgaagtacaatctgttgaaaaaagcgagctgttctcacatgaaaaactatcaccagtacttgcaatgtataaagttaaggattttgatgaagctctaaaaaaggcacaaaggctaatagaattaggtggaagtggacacacgtcatctttatatatagattcacaaaacaataaggataaagttaaagaatttggattagcaatgaaaacttcaaggacatttattaacatgccttcttcacagggagcaagcggagatttatacaattttgcgatagcaccatcatttactcttggatgcggcacttggggaggaaactctgtatcgcaaaatgtagagcctaaacatttattaaatattaaaagtgttgctgaaagaagggaaaatatgctttggtttaaagtgccacaaaaaatatattttaaatatggatgtcttagatttgcattaaaagaattaaaagatatgaataagaaaagagcctttatagtaacagataaagatctttttaaacttggatatgttaataaaataacaaaggtactagatgagatagatattaaatacagtatatttacagatattaaatctgatccaactattgattcagtaaaaaaaggtgctaaagaaatgcttaactttgaacctgatactataatctctattggtggtggatcgccaatggatgcagcaaaggttatgcacttgttatatgaatatccagaagcagaaattgaaaatctagctataaactttatggatataagaaagagaatatgcaatttccctaaattaggtacaaaggcgatttcagtagctattcctacaactgctggtaccggttcagaggcaacaccttttgcagttataactaatgatgaaacaggaatgaaataccctttaacttcttatgaattgaccccaaacatggcaataatagatactgaattaatgttaaatatgcctagaaaattaacagcagcaactggaatagatgcattagttcatgctatagaagcatatgtttcggttatggctacggattatactgatgaattagccttaagagcaataaaaatgatatttaaatatttgcctagagcctataaaaatgggactaacgacattgaagcaagagaaaaaatggcacatgcctctaatattgcggggatggcatttgcaaatgctttcttaggtgtatgccattcaatggctcataaacttggggcaatgcatcacgttccacatggaattgcttgtgctgtattaatagaagaagttattaaatataacgctacagactgtccaacaaagcaaacagcattccctcaatataaatctcctaatgctaagagaaaatatgctgaaattgcagagtatttgaatttaaagggtactagcgataccgaaaaggtaacagccttaatagaagctatttcaaagttaaagatagatttgagtattccacaaaatataagtgccgctggaataaataaaaaagatttttataatacgctagataaaatgtcagagcttgcttttgatgaccaatgtacaacagctaatcctaggtatccacttataagtgaacttaaggatatctatataaaatcattttaa

SEQ ID NO: 210 - protein, 858 aa, Clostridium acetobutylicum
MKVTNQKELKQKLNELREAQKKFATYTQEQVDKIFKQCAIAAAKERINLAKLAVEETGIGLVEDKIIKNHFAAEYIYNKYKNEKTCGIIDHDDSLGITKVAEPIGIVAAIVPTTNPTSTAIFKSLISLKTRNAIFFSPHPRAKKSTIAAAKLILDAAVKAGAPKNIIGWIDEPSIELSQDLMSEADIILATGGPSMVKAAYSSGKPAIGVGAGNTPAIIDESADIDMAVSSIILSKTYDNGVICASEQSILVMNSIYEKVKEEFVKRGSYILNQNEIAKIKETMFKNGAINADIVGKSAYIIAKMAGIEVPQTTKILIGEVQSVEKSELFSHEKLSPVLAMYKVKDFDEALKKAQRLIELGGSGHTSSLYIDSQNNKDKVKEFGLAMKTSRTFINMPSSQGASGDLYNFAIAPSFTLGCGTWGGNSVSQNVEPKHLLNIKSVAERRENMLWFKVPQKIYFKYGCLRFALKELKDMNKKRAFIVTDKDLFKLGYVNKITKVLDEIDIKYSIFTDIKSDPTIDSVKKGAKEMLNFEPDTIISIGGGSPMDAAKVMHLLYEYPEAEIENLAINFMDIRKRICNFPKLGTKAISVAIPTTAGTGSEATPFAVITNDETGMKYPLTSYELTPNMAIIDTELMLNMPRKLTAATGIDALVHAIEAYVSVMATDYTDELALRAIKMIFKYLPRAYKNGTNDIEAREKMAHASNIAGMAFANAFLGVCHSMAHKLGAMHHVPHGIACAVLIEEVIKYNATDCPTKQTAFPQYKSPNAKRKYAEIAEYLNLKGTSDTEKVTALIEAISKLKIDLSIPQNISAAGINKKDFYNTLDKMSELAFDDQCTTANPRYPLISELKDIYIKSF

SEQ ID NO: 211 - DNA, 2676 bp, Escherichia coli
atggctgttactaatgtcgctgaacttaacgcactcgtagagcgtgtaaaaaaagcccagcgtgaatatgccagtttcactcaagagcaagtagacaaaatcttccgcgccgccgctctggctgctgcagatgctcgaatcccactcgcgaaaatggccgttgccgaatccggcatgggtatcgtcgaagataaagtgatcaaaaaccactttgcttctgaatatatctacaacgcctataaagatgaaaaaacctgtggtgttctgtctgaagacgacacttttggtaccatcactatcgctgaaccaatcggtattatttgcggtatcgttccgaccactaacccgacttcaactgctatcttcaaatcgctgatcagtctgaagacccgtaacgccattatcttctccccgcacccgcgtgcaaaagatgccaccaacaaagcggctgatatcgttctgcaggctgctatcgctgccggtgctccgaaagatctgatcggctggatcgatcaaccttctgttgaactgtctaacgcactgatgcaccacccagacatcaacctgatcctcgcgactggtggtccgggcatggttaaagccgcatacagctccggtaaaccagctatcggtgtaggcgcgggcaacactccagttgttatcgatgaaactgctgatatcaaacgtgcagttgcatctgtactgatgtccaaaaccttcgacaacggcgtaatctgtgcttctgaacagtctgttgttgttgttgactctgtttatgacgctgtacgtgaacgttttgcaacccacggcggctatctgttgcagggtaaagagctgaaagctgttcaggatgttatcctgaaaaacggtgcgctgaacgcggctatcgttggtcagccagcctataaaattgctgaactggcaggcttctctgtaccagaaaacaccaagattctgatcggtgaagtgaccgttgttgatgaaagcgaaccgttcgcacatgaaaaactgtccccgactctggcaatgtaccgcgctaaagatttcgaagacgcggtagaaaaagcagagaaactggttgctatgggcggtatcggtcatacctcttgcctgtacactgaccaggataaccaaccggctcgcgtttcttacttcggtcagaaaatgaaaacggcgcgtatcctgattaacaccccagcgtctcagggtggtatcggtgacctgtataacttcaaactcgcaccttccctgactctgggttgtggttcttggggtggtaactccatctctgaaaacgttggtccgaaacacctgatcaacaagaaaaccgttgctaagcgagctgaaaacatgttgtggcacaaacttccgaaatctatctacttccgccgtggctccctgccaatcgcgctggatgaagtgattactgatggccacaaacgtgcgctcatcgtgactgaccgcttcctgttcaacaatggttatgctgatcagatcacttccgtactgaaagcagcaggcgttgaaactgaagtcttcttcgaagtagaagcggacccgaccctgagcatcgttcgtaaaggtgcagaactggcaaactccttcaaaccagacgtgattatcgcgctgggtggtggttccccgatggacgccgcgaagatcatgtgggttatgtacgaacatccggaaactcacttcgaagagctggcgctgcgctttatggatatccgtaaacgtatctacaagttcccgaaaatgggcgtgaaagcgaaaatgatcgctgtcaccaccacttctggtacaggttctgaagtcactccgtttgcggttgtaactgacgacgctactggtcagaaatatccgctggcagactatgcgctgactccggatatggcgattgtcgacgccaacctggttatggacatgccgaagtccctgtgtgctttcggtggtctggacgcagtaactcacgccatggaagcttatgtttctgtactggcatctgagttctctgatggtcaggctctgcaggcactgaaactgctgaaagaatatctgccagcgtcctaccacgaagggtctaaaaatccggtagcgcgtgaacgtgttcacagtgcagcgactatcgcgggtatcgcgtttgcgaacgccttcctgggtgtatgtcactcaatggcgcacaaactgggttcccagttccatattccgcacggtctggcaaacgccctgctgatttgtaacgttattcgctacaatgcgaacgacaacccgaccaagcagactgcattcagccagtatgaccgtccgcaggctcgccgtcgttatgctgaaattgccgaccacttgggtctgagcgcaccgggcgaccgtactgctgctaagatcgagaaactgctggcatggctggaaacgctgaaagctgaactgggtattccgaaatctatccgtgaagctggcgttcaggaagcagacttcctggcgaacgtggataaactgtctgaagatgcattcgatgaccagtgcaccggcgctaacccgcgttacccgctgatctccgagctgaaacagattctgctggatacctactacggtcgtgattatgtagaaggtgaaactgcagcgaagaaagaagctgctccggctaaagctgagaaaaaagcgaaaaaatccgcttaa

SEQ ID NO: 212 - protein, 891 aa, Escherichia coli
MAVTNVAELNALVERVKKAQREYASFTQEQVDKIFRAAALAAADARIPLAKMAVAESGMGIVEDKVIKNHFASEYIYNAYKDEKTCGVLSEDDTFGTITIAEPIGIICGIVPTTNPTSTAIFKSLISLKTRNAIIFSPHPRAKDATNKAADIVLQAAIAAGAPKDLIGWIDQPSVELSNALMHHPDINLILATGGPGMVKAAYSSGKPAIGVGAGNTPVVIDETADIKRAVASVLMSKTFDNGVICASEQSVVVVDSVYDAVRERFATHGGYLLQGKELKAVQDVILKNGALNAAIVGQPAYKIAELAGFSVPENTKILIGEVTVVDESEPFAHEKLSPTLAMYRAKDFEDAVEKAEKLVAMGGIGHTSCLYTDQDNQPARVSYFGQKMKTARILINTPASQGGIGDLYNFKLAPSLTLGCGSWGGNSISENVGPKHLINKKTVAKRAENMLWHKLPKSIYFRRGSLPIALDEVITDGHKRALIVTDRFLFNNGYADQITSVLKAAGVETEVFFEVEADPTLSIVRKGAELANSFKPDVIIALGGGSPMDAAKIMWVMYEHPETHFEELALRFMDIRKRIYKFPKMGVKAKMIAVTTTSGTGSEVTPFAVVTDDATGQKYPLADYALTPDMAIVDANLVMDMPKSLCAFGGLDAVTHAMEAYVSVLASEFSDGQALQALKLLKEYLPASYHEGSKNPVARERVHSAATIAGIAFANAFLGVCHSMAHKLGSQFHIPHGLANALLICNVIRYNANDNPTKQTAFSQYDRPQARRRYAEIADHLGLSAPGDRTAAKIEKLLAWLETLKAELGIPKSIREAGVQEADFLANVDKLSEDAFDDQCTGANPRYPLISELKQILLDTYYGRDYVEGETAAKKEAAPAKAEKKAKKSA

SEQ ID NO: 213 - DNA, 1167 bp, Escherichia coli
atgaacttacatgaatatcaggcaaaacaactttttgcccgctatggcttaccagcaccggtgggttatgcctgtactactccgcgcgaagcagaagaagccgcttcaaaaatcggtgccggtccgtgggtagtgaaatgtcaggttcacgctggtggccgcggtaaagcgggcggtgtgaaagttgtaaacagcaaagaagacatccgtgcttttgcagaaaactggctgggcaagcgtctggtaacgtatcaaacagatgccaatggccaaccggttaaccagattctggttgaagcagcgaccgatatcgctaaagagctgtatctcggtgccgttgttgaccgtagttcccgtcgtgtggtctttatggcctccaccgaaggcggcgtggaaatcgaaaaagtggcggaagaaactccgcacctgatccataaagttgcgcttgatccgctgactggcccgatgccgtatcagggacgcgagctggcgttcaaactgggtctggaaggtaaactggttcagcagttcaccaaaatcttcatgggcctggcgaccattttcctggagcgcgacctggcgttgatcgaaatcaacccgctggtcatcaccaaacagggcgatctgatttgcctcgacggcaaactgggcgctgacggcaacgcactgttccgccagcctgatctgcgcgaaatgcgtgaccagtcgcaggaagatccgcgtgaagcacaggctgcacagtgggaactgaactacgttgcgctggacggtaacatcggttgtatggttaacggcgcaggtctggcgatgggtacgatggacatcgttaaactgcacggcggcgaaccggctaacttccttgacgttggcggcggcgcaaccaaagaacgtgtaaccgaagcgttcaaaatcatcctctctgacgacaaagtgaaagccgttctggttaacatcttcggcggtatcgttcgttgcgacctgatcgctgacggtatcatcggcgcggtagcagaagtgggtgttaacgtaccggtcgtggtacgtctggaaggtaacaacgccgaactcggcgcgaagaaactggctgacagcggcctgaatattattgcagcaaaaggtctgacggatgcagctcagcaggttgttgccgcagtggaggggaaataa

SEQ ID NO: 214 - protein, 388 aa, Escherichia coli
MNLHEYQAKQLFARYGLPAPVGYACTTPREAEEAASKIGAGPWVVKCQVHAGGRGKAGGVKVVNSKEDIRAFAENWLGKRLVTYQTDANGQPVNQILVEAATDIAKELYLGAVVDRSSRRVVFMASTEGGVEIEKVAEETPHLIHKVALDPLTGPMPYQGRELAFKLGLEGKLVQQFTKIFMGLATIFLERDLALIEINPLVITKQGDLICLDGKLGADGNALFRQPDLREMRDQSQEDPREAQAAQWELNYVALDGNIGCMVNGAGLAMGTMDIVKLHGGEPANFLDVGGGATKERVTEAFKIILSDDKVKAVLVNIFGGIVRCDLIADGIIGAVAEVGVNVPVVVRLEGNNAELGAKKLADSGLNIIAAKGLTDAAQQVVAAVEGK

SEQ ID NO: 215 - DNA, 870 bp, Escherichia coli
atgtccattttaatcgataaaaacaccaaggttatctgccagggctttaccggtagccaggggactttccactcagaacaggccattgcatacggcactaaaatggttggcggcgtaaccccaggtaaaggcggcaccacccacctcggcctgccggtgttcaacaccgtgcgtgaagccgttgctgccactggcgctaccgcttctgttatctacgtaccagcaccgttctgcaaagactccattctggaagccatcgacgcaggcatcaaactgattatcaccatcactgaaggcatcccgacgctggatatgctgaccgtgaaagtgaagctggatgaagcaggcgttcgtatgatcggcccgaactgcccaggcgttatcactccgggtgaatgcaaaatcggtatccagcctggtcacattcacaaaccgggtaaagtgggtatcgtttcccgttccggtacactgacctatgaagcggttaaacagaccacggattacggtttcggtcagtcgacctgtgtcggtatcggcggtgacccgatcccgggctctaactttatcgacattctcgaaatgttcgaaaaagatccgcagaccgaagcgatcgtgatgatcggtgagatcggcggtagcgctgaagaagaagcagctgcgtacatcaaagagcacgttaccaagccagttgtgggttacatcgctggtgtgactgcgccgaaaggcaaacgtatgggccacgcgggtgccatcattgccggtgggaaagggactgcggatgagaaattcgctgctctggaagccgcaggcgtgaaaaccgttcgcagcctggcggatatcggtgaagcactgaaaactgttctgaaataa

SEQ ID NO: 216 - protein, 289 aa, Escherichia coli
MSILIDKNTKVICQGFTGSQGTFHSEQAIAYGTKMVGGVTPGKGGTTHLGLPVFNTVREAVAATGATASVIYVPAPFCKDSILEAIDAGIKLIITITEGIPTLDMLTVKVKLDEAGVRMIGPNCPGVITPGECKIGIQPGHIHKPGKVGIVSRSGTLTYEAVKQTTDYGFGQSTCVGIGGDPIPGSNFIDILEMFEKDPQTEAIVMIGEIGGSAEEEAAAYIKEHVTKPVVGYIAGVTAPKGKRMGHAGAIIAGGKGTADEKFAALEAAGVKTVRSLADIGEALKTVLK

SEQ ID NO: 217 - DNA, 1356 bp, Porphyromonas gingivalis
atggaaatcaaagaaatggtgagccttgcgcgcaaggctcagaaggagtatcaagctactcataaccaagaagcagttgacaacatttgccgagctgcagcgaaagttatttatgaaaatgcagctattctggctcgcgaagcagtagacgaaaccggcatgggcgtttacgaacacaaagtggccaagaatcaaggcaaatccaaaggtgtttggtacaacctccacaataaaaaatcggttggtatcctcaatatagacgagcgtaccggtatgatcgagatcgcaaagcctatcggagttgtaggagccgtaacgccgacgaccaacccgatcgttactccgatgagcaatatcatctttgctcttaagacttgcaatgccatcattattgccccccaccccagatctaaaaaatgctctgcacacgcagttcgtctgatcaaagaagctatcgctccgttcaacgtaccggaaggtatggttcagatcatcgaagaacccagcatcgagaagacgcaggaactcatgggcgccgtagacgtagtagttgctacgggaggtatgggcatggtgaagtctgcatattcttcaggaaagccttctttcggtgttggagccggtaacgttcaggtgatcgtggatagcaacatcgatttcgaagccgctgcagaaaaaatcatcaccggtcgtgctttcgacaacggtatcatctgctcaggcgaacagagcatcatctacaacgaggctgacaaggaagcagttttcacagcattccgcaaccacggtgcatatttctgtgacgaagccgaaggagatcgggctcgtgcggctatcttcgaaaatggagccatcgcgaaagatgtagtaggtcagagtgttgccttcattgccaagaaagcaaacatcaatatccccgagggtacccgtattctcgttgttgaagctcgcggcgtaggagcagaagacgttatctgtaaggaaaagatgtgtcccgtaatgtgcgccctcagctacaagcacttcgaagaaggtgtagaaatcgcacgtacgaacctcgccaacgaaggtaacggccacacctgtgctatccactccaacaatcaggcacacatcatcctcgcaggatcagagctgacggtatctcgtatcgtagtgaatgctccgagtgctactacagcaggcggtcacatccaaaacggtcttgccgtaaccaatacgctcggatgcggatcatggggtaataactctatctccgagaacttcacttacaagcacctcctcaacatttcacgcatcgcaccgctgaattcaagcattcacatccccaatgacaaagaaatctgggaactctaa

SEQ ID NO: 218 - protein, 451 aa, Porphyromonas gingivalis
MEIKEMVSLARKAQKEYQATHNQEAVDNICRAAAKVIYENAAILAREAVDETGMGVYEHKVAKNQGKSKGVWYNLHNKKSVGILNIDERTGMIEIAKPIGVVGAVTPTTNPIVTPMSNIIFALKTCNAIIIAPHPRSKKCSAHAVRLIKEAIAPFNVPEGMVQIIEEPSIEKTQELMGAVDVVVATGGMGMVKSAYSSGKPSFGVGAGNVQVIVDSNIDFEAAAEKIITGRAFDNGIICSGEQSIIYNEADKEAVFTAFRNHGAYFCDEAEGDRARAAIFENGAIAKDVVGQSVAFIAKKANINIPEGTRILVVEARGVGAEDVICKEKMCPVMCALSYKHFEEGVEIARTNLANEGNGHTCAIHSNNQAHIILAGSELTVSRIVVNAPSATTAGGHIQNGLAVTNTLGCGSWGNNSISENFTYKHLLNISRIAPLNSSIHIPNDKEIWEL

SEQ ID NO: 219 - DNA, 1944 bp, Synechococcus elongatus PCC7942
atggcggctgaacaaacggcgatcgcacccttggcggtagctgttgagtcgcagcagtggcgcattgaagacagcgaagcgctctatcggattcagggctggggtgagccttactttggtatcaatgctgccggtcacattaccgtttcaccccaaggcgatcgcggcggctccctcgacctttatgaactcgtagaagcgctgcggcggcggggcctgaatctgcccttgctgatccgctttcccgatattttggaagaccggatcgagcggttgaatgcttgctttgccaaagcgatcgctcgttataactatgccggtgagtatcggggcgttttccccgtcaagtgcaaccagcagcgccatttgatcgaaagtttggtcaactatgggcgtccttttcaatttgggctagaagcgggttcaaagccggaactattaattgccctggcgcacttggatacgccgggggcgttgctgatctgcaacggctataaagatcgggactatatcgaaacggcgattctgggacggcgcttgggcaaaacgcccatccttgtgattgagcaactggaagaagtggacgttgcgatcgccgccagccagcgcttggggatcgaacccattttaggtgtgcgtgccaagctcaacgccagaggaatggggcgctggggcagttcggcaggcgatcgcgccaagtttggtctgaccatgcccgagattgtggcggcagtcgagaaacttcaggcagcgaacctgctgcactgtctgcaactgctgcacttccatatcggctcgcaaatttctgatatcagcgtgctcaaggatgcgatccaagaagcagcgcagatctatgtgcaactggccgccttgggcgcagacatgcgttatctcgatgttggtggtggtttgggggtcgattacgacggttcgaagaccaacttccacgcctcgaaaaactacaacatgcagacctacgccaacgatgtggttgccacgattaaggatgcttgtcaggcacaccggctggctgtcccgaccttaacgagtgagagtgggcgcgcgatcgcctctcaccaatcggtgttggtatttgatgtgttgggcagtagcgaggtgcctcgggctgccgtggaaccacctcaggaagaggattctgcgatcgtccgcaccctttacgaagtcttggaagcgatcgcccttgagaatctgcaggagtgctatcacgatgccttcaaactcaaggaagatgcggtttctgccttccgcttgggctatttgagtttgacagagcgcgccaaagcagagcgactcttttggagctgctgccatcggattcaggagttcttgaagcaactcgaccgcattcctgaagatctcgaagatctagaacgggtgatggcgtcgatttattacgtcaacctctccgtcttccaatcagctcccgatacttgggcgatcgatcagctcttcccaatcatgccgattcatcgtctgaatgaagagcctaatcagcgggtaacgcttgcagatctgacctgtgatagcgatggcaaaattgatcgctttattgacttgctagatgtcaaatctacgttagaacttcattcgctccagcccgaccaaccctacgttttagggatgtttttaggcggtgcctaccaagagattatgggtaatcttcataacctgtttggggataccaatgccgtccatatcaaactgacgcctaagggctacagcattgagcatgtggttaaaggtgacacgatgggcgaagtcttgggctatgtccaatacgatacggaacagcttctagaacgtctacgccagcaaactgaagctgctttgcaacaggatcaaatcagtttagatgaagcccagcggctgcttcgccattatgaagagggtctacagcggtatacctatctcagcttggattag

SEQ ID NO: 220 - protein, 647 aa, Synechococcus elongatus PCC7942
MAAEQTAIAPLAVAVESQQWRIEDSEALYRIQGWGEPYFGINAAGHITVSPQGDRGGSLDLYELVEALRRRGLNLPLLIRFPDILEDRIERLNACFAKAIARYNYAGEYRGVFPVKCNQQRHLIESLVNYGRPFQFGLEAGSKPELLIALAHLDTPGALLICNGYKDRDYIETAILGRRLGKTPILVIEQLEEVDVAIAASQRLGIEPILGVRAKLNARGMGRWGSSAGDRAKFGLTMPEIVAAVEKLQAANLLHCLQLLHFHIGSQISDISVLKDAIQEAAQIYVQLAALGADMRYLDVGGGLGVDYDGSKTNFHASKNYNMQTYANDVVATIKDACQAHRLAVPTLTSESGRAIASHQSVLVFDVLGSSEVPRAAVEPPQEEDSAIVRTLYEVLEAIALENLQECYHDAFKLKEDAVSAFRLGYLSLTERAKAERLFWSCCHRIQEFLKQLDRIPEDLEDLERVMASIYYVNLSVFQSAPDTWAIDQLFPIMPIHRLNEEPNQRVTLADLTCDSDGKIDRFIDLLDVKSTLELHSLQPDQPYVLGMFLGGAYQEIMGNLHNLFGDTNAVHIKLTPKGYSIEHVVKGDTMGEVLGYVQYDTEQLLERLRQQTEAALQQDQISLDEAQRLLRHYEEGLQRYTYLSLD

SEQ ID NO: 221 - DNA, 1131 bp, Synechococcus elongatus PCC7942
atgaggggggatttcgcaccgaacgaccgtacccaaacaaccgaagccgctaggctgaacaagggtctttttgctagtcaaatcatgagtcaggggcaacagagcgatcgccgttttccagcggaatgggaagcgcaggacggtgttttgattgcttggccccatgcggacagtgattggcgatcgctgttggatcaggtcgatcgcgtctaccgtgacctagcggaagcagtgacgcgctttgagcagttgctgatcgtgacgccagagcccgatcgcgtggcagaacaactggcgcagaccactgcgaattgcgatcgcattcagattgttgaactgcccaccaatgacacttggagccgcgattttgggccgctgacggtggaaaccccagcagggctgcgactgctggattggggcttcaatggctggggcctaaagtttgccgccaaccacgacaaccaagtgacacggcgactttggcagcaaggaatttttggcaccacgccgctggaaactgtgccgctgatttttgaagggggcagtatcgaaagtgatggacgcggcaccctactcaccacgagtcagtgtttgctggaagcgaatcgtaatccgggcttgagccgcgaggcgatcgcgcagatcatccagcgacaactggggggcgatcgcctgctctggttggagcatggccatttggaaggcgatgacacggacgcccacatcgacacgctggtgcggatcgcacctaatgacacgctgatttacgttgcctgcgacgatcccagtgacagtcatgcggcagaactaacagcccttgaagcagaactcaaagccttgcgcgcggcggacggacagccctaccacttgattcccttgccttggccgcaaccctgcttcgatgcggatggtcagcgcttgccgacaacctacgccaattacttagtcatcaatggcgcagtcttagtaccgacttacaacgatccggcagatgaggcggcgatcgcggcaatcgccgctgctttccccgatcgcctcgcgatcggcatcaactgtcggccactcctggagcaacatggctcactgcattgcatcacgatgcaactgcctgctggacttctcagtcgctaa

SEQ ID NO: 222 - protein, 376 aa, Synechococcus elongatus PCC7942
MRGDFAPNDRTQTTEAARLNKGLFASQIMSQGQQSDRRFPAEWEAQDGVLIAWPHADSDWRSLLDQVDRVYRDLAEAVTRFEQLLIVTPEPDRVAEQLAQTTANCDRIQIVELPTNDTWSRDFGPLTVETPAGLRLLDWGFNGWGLKFAANHDNQVTRRLWQQGIFGTTPLETVPLIFEGGSIESDGRGTLLTTSQCLLEANRNPGLSREAIAQIIQRQLGGDRLLWLEHGHLEGDDTDAHIDTLVRIAPNDTLIYVACDDPSDSHAAELTALEAELKALRAADGQPYHLIPLPWPQPCFDADGQRLPTTYANYLVINGAVLVPTYNDPADEAAIAAIAAAFPDRLAIGINCRPLLEQHGSLHCITMQLPAGLLSR

SEQ ID NO: 223 - DNA, 888 bp, Synechococcus elongatus PCC7942
atggcttcgacgttgcgtgtcgctctggctcaactggcatttagcgatcagccggtgatcgatcgcgatcgcgtgacagcagcgattcgggaagctgcagcagctggggcagaactgattgtgctgcccgagatccacggcggctactacttttgccagaccgaagatccagctcagtttgatcgcgccgagtccattccaggaccgagtacggactactacagcgcgatcgcccgagaactgtccgttgttctcatcctttcgctgtttgagcggcgggcagccggactctaccacaacactgctgtcgtgattgaacgggatggaacgatcgcgggtcgttaccgcaaaatgcacattcctgacgatccggcttactacgagaagttctacttcacgccgggcgacttggggtttgaaccgattcagacttcggtgggcaagttaggggttctggtctgctgggatcagtggtatcccgaagcagcgcgactgatggcgctggctggtgccgagttgctgatctatccgaccgcaatcggctgggatccgcaagacgtgcccgaggaacaacagcggcaactcgaagcttggcaaaccgtgcagcggggtcacgcaatcgccaatggaattcccgtgttgagtgtcaatcgggttggctttgaaccctcgcccgatccagctgctgcgggcagtcaattctggggcagcagtttcattgccgggccgcagggggaatggttagcaaaggctggcgatcgcgagccggaactgctgattgctgatctcgatcgcgatcgcagtgaacaggtgcggcggatctggcccttcctgcgcgatcgccgcatcgatgcctacggcgatttagtacgtcgctatcgagactaa

SEQ ID NO: 224 - protein, 295 aa, Synechococcus elongatus PCC7942
MASTLRVALAQLAFSDQPVIDRDRVTAAIREAAAAGAELIVLPEIHGGYYFCQTEDPAQFDRAESIPGPSTDYYSAIARELSVVLILSLFERRAAGLYHNTAVVIERDGTIAGRYRKMHIPDDPAYYEKFYFTPGDLGFEPIQTSVGKLGVLVCWDQWYPEAARLMALAGAELLIYPTAIGWDPQDVPEEQQRQLEAWQTVQRGHAIANGIPVLSVNRVGFEPSPDPAAAGSQFWGSSFIAGPQGEWLAKAGDREPELLIADLDRDRSEQVRRIWPFLRDRRIDAYGDLVRRYRD

SEQ ID NO: 225 - DNA, 20 bp, ARTIFICIAL SEQUENCE
  glgA5 Primer
tgagccaagttgcggtgcag

SEQ ID NO: 226 - DNA, 31 bp, ARTIFICIAL SEQUENCE
  glgA3 Primer
cgcgcactagtggagaggttgtaggtctgac

SEQ ID NO: 227 - DNA, 33 bp, ARTIFICIAL SEQUENCE
  glgB5 Primer
gtagcgcggccgccctcggagctacggcaccag

SEQ ID NO: 228 - DNA, 31 bp, ARTIFICIAL SEQUENCE
  glgB3 Primer
cgcggtctagataccggcatagcgcagtaag

SEQ ID NO: 229 - DNA, 20 bp, ARTIFICIAL SEQUENCE
  gent5b Primer
cgatctcctgaagccagggc

SEQ ID NO: 230 - DNA, 20 bp, ARTIFICIAL SEQUENCE
  gent3a Primer
ggcgttgtgacaatttaccg

SEQ ID NO: 231 - DNA, 32 bp, ARTIFICIAL SEQUENCE
  glgCUpEcoRVnew Primer
gttgttgatatctgagccaagttgcggtgcag

SEQ ID NO: 232 - DNA, 40 bp, ARTIFICIAL SEQUENCE
  glgCcompdownXbaI Primer
gttgtttctagattagatcaccgtgttgtcgggaataacc

SEQ ID NO: 233 - DNA, 20 bp, ARTIFICIAL SEQUENCE
  glg1 Primer
cggcaccgagacaccaatgc

SEQ ID NO: 234 - DNA, 20 bp, ARTIFICIAL SEQUENCE
  glg2 Primer
gcattgcttgagaatgcagc

SEQ ID NO: 235 - DNA, 20 bp, ARTIFICIAL SEQUENCE
  gent5 Primer
acataagcctgttcggttcg

SEQ ID NO: 236 - DNA, 21 bp, ARTIFICIAL SEQUENCE
  gent3 Primer
ttaggtggcggtacttgggtc

SEQ ID NO: 237 - DNA, 20 bp, ARTIFICIAL SEQUENCE
  NS1inta Primer
gtcgatatctggcacggtgc

SEQ ID NO: 238 - DNA, 23 bp, ARTIFICIAL SEQUENCE
  NS1intb Primer
catttccgatgaggtcggttatc

SEQ ID NO: 239 - DNA, 21 bp, ARTIFICIAL SEQUENCE
  NS2inta Primer
gcgatcgccgaagactgtgac

SEQ ID NO: 240 - DNA, 22 bp, ARTIFICIAL SEQUENCE
  NS2intb Primer
cgttgccgtagaccagttgctc

SEQ ID NO: 241 - DNA, 20 bp, ARTIFICIAL SEQUENCE
  luxA1 Primer
acacctattaggtgcgacag

SEQ ID NO: 242 - DNA, 20 bp, ARTIFICIAL SEQUENCE
  luxA2 Primer
catgatcgacggaggtgatg

SEQ ID NO: 243 - DNA, 24 bp, ARTIFICIAL SEQUENCE
  kgtP_seq_f2 Primer
gaagtatctggtaaatactgcggg

SEQ ID NO: 244 - DNA, 20 bp, ARTIFICIAL SEQUENCE
  NS2_rev_a Primer
accaatgctgggtagttctc

SEQ ID NO: 245 - DNA, 37 bp, ARTIFICIAL SEQUENCE
  nblA promoter_fwd Primer
gcaataatgcggccgcggcgctgcctgggaaagtcac

SEQ ID NO: 246 - DNA, 33 bp, ARTIFICIAL SEQUENCE
  nblA promoter_rev Primer
cattgaacatatgagcctccggcactgcagatg

SEQ ID NO: 247 - DNA, 31 bp, ARTIFICIAL SEQUENCE
  kgtP_F1_Nde Primer
gcaataatcatatggctgaaagtactgtaac

SEQ ID NO: 248 - DNA, 32 bp, ARTIFICIAL SEQUENCE
  kgtP_R1_Bgl Primer
cattgaaagatctctaaagacgcatccccttc

SEQ ID NO: 249 - DNA, 45 bp, ARTIFICIAL SEQUENCE
  kgtP_int_F1 Primer
cattaggcgttggtctgtcgtatgcggtcgctaatgctatatttg

SEQ ID NO: 250 - DNA, 45 bp, ARTIFICIAL SEQUENCE
  kgtP_int_R1 Primer
caaatatagcattagcgaccgcatacgacagaccaacgcctaatg

1.-63. (canceled)

64. A system for producing a carbon-containing compound, comprising:
a modified Cyanobacterium that accumulates a reduced amount of glycogen as compared to a corresponding wild-type Cyanobacterium; and
a culture system for culturing the modified Cyanobacterium under a stress condition,
wherein the modified Cyanobacterium maintains photosynthetic activity and accumulates reduced biomass when grown under the stress condition as compared to when grown under a non-stress condition.

65. The system of claim 64, wherein the modified Cyanobacterium secretes and/or intracellularly accumulates an increased amount of a carbon-containing compound when grown under the stress condition as compared to when grown under non-stress conditions, or as compared to the corresponding wild-type Cyanobacterium grown under the stress condition.

66. The system of claim 64, wherein the modified Cyanobacterium has reduced expression of one or more genes of a glycogen biosynthesis or storage pathway as compared to the corresponding wild-type photosynthetic microorganism, and wherein the one or more genes are selected from the group consisting of: a glucose-1-phosphate adenyltransferase (glgC) gene, a phosphoglucomutase (pgm) gene, and a glycogen synthase (glgA) gene.

67. The system of claim 64, wherein the stress condition is a reduced level of an essential nutrient, and wherein the essential 5 nutrient is selected from at least one of nitrogen, sulfur, and phosphorous.

68. The system of claim 64, wherein the modified Cyanobacterium further: comprises one or more introduced polynucleotides encoding a protein that increases glycogen breakdown; and/or comprises one or more introduced polynucleotides encoding a protein that increases secretion of a glycogen precursor.

69. The system of claim 64, wherein the Cyanobacterium is a Synechococcus elongatus.

70. The system of claim 64, wherein the carbon-containing compound is a lipid.

71. The system of claim 64, wherein the carbon-containing compound is one or more of 2-oxoglutarate, pyruvate, malate, fumarate, succinate, 4-hydroxybutyrate, 1,4 butanediol, glutaconic acid, 3-methyl-2-oxobutyrate, 3methyl-2-oxovalerate, 4-methyl-2-oxopentanoate, isobutaraldehyde, isobutanol, 2methyl-1-butanol, 3-methyl-2-butanol, isopentanol, glucose, glutathione, 3phosphoglycerate, cis-aconitate, agmatine, putrescine, or glycyerin.

72. The system of claim 64, wherein photosynthetic activity of the modified Cyanobacterium under the stress condition is substantially greater than photosynthetic activity of the corresponding wild-type Cyanobacterium under the stress condition.

73. The system of claim 64, wherein photosynthetic activity of the modified Cyanobacterium under the stress condition:
is at least about 1.5, 2, 3, 4, 5, 6, 7, 8, 9, 10 or 20-fold greater than photosynthetic activity of the corresponding wild-type Cyanobacterium under the stress condition; or
is measured at about day 2, 3, 4, 5, 6, 7, 8, 9, 10, 11, 12, 13, or 14 post-initiation of the stress condition.

74. A method for producing a carbon-containing compound other than glycogen, comprising culturing in a culture media under a stress condition a modified Cyanobacterium that accumulates a reduced amount of glycogen as compared to a corresponding wild-type Cyanobacterium, wherein the modified Cyanobacterium maintains photosynthetic activity and accumulates reduced biomass when grown under the stress condition as compared to when grown under non-stress conditions.

75. The method of claim 74, wherein the modified Cyanobacterium secretes and/or intracellularly accumulates an increased amount of a carbon-containing compound when grown under the stress condition as compared to when grown under non-stress conditions, or as compared to a corresponding wild-type Cyanobacterium grown under the stress condition.

76. The method of claim 74, wherein the modified Cyanobacterium has reduced expression of one or more genes of a glycogen biosynthesis or storage pathway as compared to the corresponding wild-type Cyanobacterium, and wherein the one or more genes are selected from the group consisting of: a glucose-1-phosphate adenyltransferase (glgC) gene, a phosphoglucomutase (pgm) gene, and a glycogen synthase (glgA) gene.

77. The system of claim 74, wherein the stress condition is a reduced level of an essential nutrient, and wherein the essential 5 nutrient is selected from at least one of nitrogen, sulfur, and phosphorous.

78. The method of claim 74, wherein the modified Cyanobacterium further: comprises one or more introduced polynucleotides encoding a protein that increases glycogen breakdown; and/or comprises one or more introduced polynucleotides encoding a protein that increases secretion of a glycogen precursor.

79. The method of claim 74, wherein Cyanobacterium is a Synechococcus elongatus.

80. The method of claim 74, wherein the carbon-containing compound is a lipid.

81. The method of claim 74, wherein the carbon-containing compound is one or more of 2-oxoglutarate, pyruvate, malate, fumarate, succinate, 4-hydroxybutyrate, 1,4 butanediol, glutaconic acid, 3-methyl-2-oxobutyrate, 3-methyl-2-oxovalerate, 4-methyl-2-oxopentanoate, isobutaraldehyde, isobutanol, 2-methyl-1-butanol, 3-methyl-2-butanol, isopentanol, glucose, glutathione, 3-phosphoglycerate, cis-aconitate, agmatine, putrescine, or glycyerin.

82. The method of claim 74, wherein photosynthetic activity of the modified Cyanobacterium under the stress condition is substantially greater than photosynthetic activity of the corresponding wild-type Cyanobacterium under the stress condition.

83. The method of claim 74, wherein the maintained photosynthetic activity comprises maintenance of chlorophyll A levels, wherein the chlorophyll A levels:
are at least about 1.5, 2, 3, 4, 5, 6, 7, 8, 9, 10 or 20-fold greater than chlorophyll A levels of the 10 corresponding wild-type Cyanobacterium under the stress condition.
are measured at about day 2, 3, 4, 5, 6, 7, 8, 9, 10, 11, 12, 13, or 14 post-initiation of the stress condition.
